(19) United States
(12) Patent Application Publication
(10) Pub. No.: US 2018/0265913 A1
(43) Pub. Date: Sep. 20, 2018

(54) GENETIC TESTING FOR PREDICTING RESISTANCE OF PSEUDOMONAS SPECIES AGAINST ANTIMICROBIAL AGENTS

(71) Applicant: Ares Genetics GmbH, Vienna (AT)

(72) Inventors: Andreas Keller, Puttlingen (DE); Susanne Schmolke, Erlangen (DE); Cord Friedrich Stahler, Hirschberg an der Bergstrasse (DE); Christina Backes, Saarbrucken (DE); Valentina Galata, Saarbrucken (DE)

(21) Appl. No.: 15/745,633

(22) PCT Filed: Jul. 21, 2016
(86) PCT No.: PCT/EP2016/067406

§ 371 Date: Jan. 17, 2018

(30) Foreign Application Priority Data
Jul. 22, 2015 (EP) PCT/EP2015/066773

(51) Int. Cl. C12Q 1/689

(52) U.S. Cl. CPC C12Q 1/689; C12Q 2600/106; C12Q 2600/156

(57) ABSTRACT

The invention relates to a method of determining an infection of a patient with Pseudomonas species potentially resistant to antimicrobial drug treatment, a method of selecting a treatment of a patient suffering from an antibiotic resistant Pseudomonas infection, and a method of determining an antibiotic resistance profile for bacterial microorganisms of Pseudomonas species, as well as computer program products used in these methods. In an exemplary method, a sample 1, is used for molecular testing 2, and then a molecular fingerprint 3 is taken. The result is then compared to a reference library 4, and the result 5 is reported.

[0001] The present invention relates to a method of determining an infection of a patient with Pseudomonas species potentially resistant to antimicrobial drug treatment, a method of selecting a treatment of a patient suffering from an infection with a potentially resistant Pseudomonas strain, and a method of determining an antimicrobial drug, e.g. antibiotic, resistance profile for bacterial microorganisms of Pseudomonas species, as well as computer program products used in these methods.

[0002] Antibiotic resistance is a form of drug resistance whereby a sub-population of a microorganism, e.g. a strain of a bacterial species, can survive and multiply despite exposure to an antibiotic drug. It is a serious and health concern for the individual patient as well as a major public health issue. Timely treatment of a bacterial infection requires the analysis of clinical isolates obtained from patients with regard to antibiotic resistance, in order to select an efficacious therapy. Generally, for this purpose an association of the identified resistance with a certain microorganism (i.e. ID) is necessary.

[0003] Antibacterial drug resistance (ADR) represents a major health burden. According to the World Health Organization's antimicrobial resistance global report on surveillance, ADR leads to 25,000 deaths per year in Europe and 23,000 deaths per year in the US. In Europe, 2.5 million extra hospital days lead to societal cost of 1.5 billion euro. In the US, the direct cost of 2 million illnesses leads to 20 billion dollar direct cost. The overall cost is estimated to be substantial-ly higher, reducing the gross domestic product (GDP) by up to 1.6%.

[0004] Pseudomonas ssp. are gram-negative, aerobic bacilli belonging to the family of Pseudomonadaceae. Pseudomonas aeruginosa has received the most attention because of the frequency with which it is involved in human disease. Although it seldom causes disease in healthy individuals, it is a major threat to hospitalized patients, particularly those with serious underlying diseases such as cancer and burns. The high mortality associated with these infections is due to a combination of weakened host defenses, bacterial resistance to antibiotics, and the production of extracellular bacterial enzymes and toxins.

[0005] Pseudomonas aeruginosa causes various diseases. The pathogen is increasingly recognized as an important etiology of healthcare-associated pneumonia and is consistently identified as the most commonly isolated pathogen causing ventilator-associated pneumonia. Furthermore, Pseudomonas aeruginosa is well known as a cause of chronic infection of the lungs and airways in patients with cystic fibrosis. Localized infection following surgery or burns commonly results in a generalized and frequently fatal bacteremia. Urinary tract infections following introduction of Pseudomonas aeruginosa on catheters or in irrigating solutions are not uncommon. Pseudomonas aeruginosa can cause severe corneal infections following eye surgery or injury. It occasionally causes meningitis following lumbar puncture and endocarditis following cardiac surgery. It has been associated with some diarrheal disease episodes.

[0006] Pseudomonas is intrinsically resistant to a multitude of antibiotics presumably as a result of impermeability of the outer membrane combined with active efflux pumps. Besides intrinsic resistance, Pseudomonas easily develops acquired resistance either by mutation in chromosomally encoded genes or by the horizontal gene transfer of antibiotic resistance determinants.

[0007] In a recent report by CDC, titled Antibiotic Resistance Threats in the United States, 2013, multidrug-resistant Pseudomonas aeruginosa was listed among bacteria that pose a serious threat level. Approximately 8% of all healthcare-associated infections reported to CDC's National Healthcare Safety Network are caused by Pseudomonas aeruginosa. About 13% of severe healthcare-associated infections caused by Pseudomonas aeruginosa are multidrug resistant, meaning several classes of antibiotics no longer cure these infections.

[0008] In general the mechanisms for resistance of bacteria against antimicrobial treatments rely to a very substantial part on the organism's genetics. The respective genes or molecular mechanisms are either encoded in the genome of the bacteria or on plasmids that can be interchanged between different bacteria. The most common resistance mechanisms include:
[0009] 1) Efflux pumps are high-affinity reverse transport systems located in the membrane that transports the antibiotic out of the cell, e.g. resistance to tetracycline.
[0010] 2) Specific enzymes modify the antibiotic in a way that it loses its activity. In the case of streptomycin, the antibiotic is chemically modified so that it will no longer bind to the ribosome to block protein synthesis.
[0011] 3) An enzyme is produced that degrades the antibiotic, thereby inactivating it. For example, the penicillinases are a group of beta-lactamase enzymes that cleave the beta lactam ring of the penicillin molecule.

[0012] In addition, some pathogens show natural resistance against drugs. For example, an organism can lack a transport system for an antibiotic or the target of the antibiotic molecule is not present in the organism.

[0013] Pathogens that are in principle susceptible to drugs can become resistant by modification of existing genetic material (e.g. spontaneous mutations for antibiotic resistance, happening in a frequency of one in about 100 mio bacteria in an infection) or the acquisition of new genetic material from another source. One example is horizontal gene transfer, a process where genetic material contained in small packets of DNA can be transferred between individual bacteria of the same species or even between different species. Horizontal gene transfer may happen by transduction, transformation or conjugation.

[0014] Generally, testing for susceptibility/resistance to antimicrobial agents is performed by culturing organisms in different concentration of these agents.

[0015] In brief, agar plates are inoculated with patient sample (e.g. urine, sputum, blood, stool) overnight. On the next day individual colonies are used for identification of organisms, either by culturing or using mass spectroscopy. Based on the identity of organisms new plates containing increasing concentration of drugs used for the treatment of these organisms are inoculated and grown for additional 12-24 hours. The lowest drug concentration which inhibits growth (minimal inhibitory concentration—MIC) is used to determine susceptibility/resistance for tested drugs. The process takes at least 2 to 3 working days during which the patient is treated empirically. A significant reduction of time-to-result is needed especially in patients with life-threatening disease and to overcome the widespread misuse of antibiotics.

[0016] Recent developments include PCR based test kits for fast bacterial identification (e.g. Biomerieux Biofire Tests, Curetis Unyvero Tests). With these test the detection of selected resistance loci is possible for a very limited number of drugs, but no correlation to culture based AST is given. Mass spectroscopy is increasingly used for identification of pathogens in clinical samples (e.g. Bruker Biotyper), and research is ongoing to establish methods for the detection of susceptibility/resistance against antibiotics.

[0017] For some drugs such it is known that at least two targets are addressed, e.g. in case of Ciprofloxacin (drug bank ID 00537; http://www.drugbank.ca/drugs/DB00537) targets include DNA Topoisomerase IV, DNA Topoisomerase II and DNA Gyrase. It can be expected that this is also the case for other drugs although the respective secondary targets have not been identified yet. In case of a common regulation, both relevant genetic sites would naturally show a co-correlation or redundancy.

[0018] It is known that drug resistance can be associated with genetic polymorphisms. This holds for viruses, where resistance testing is established clinical practice (e.g. HIV genotyping). More recently, it has been shown that resistance has also genetic causes in bacteria and even higher organisms, such as humans where tumors resistance against certain cytostatic agents can be linked to genomic mutations.

[0019] Wozniak et al. (BMC Genomics 2012, 13(Suppl 7):S23) disclose genetic determinants of drug resistance in Staphylococcus aureus based on genotype and phenotype data. Stoesser et al. disclose prediction of antimicrobial susceptibilities for Escherichia coli and Klebsiella pneumoniae isolates using whole genomic sequence data (J Antimicrob Chemother 2013; 68: 2234-2244).

[0020] Chewapreecha et al (Chewapreecha et al (2014) Comprehensive Identification of single nucleotide polymorphisms associated with beta-lactam resistance within pneumococcal mosaic genes. PLoS Genet 10(8): e1004547) used a comparable approach to identify mutations in gram-positive Streptococcus Pneumonia.

[0021] The fast and accurate detection of infections with Pseudomonas species and the prediction of response to anti-microbial therapy represent a high unmet clinical need.

[0022] This need is addressed by the present invention.

### SUMMARY OF THE INVENTION

[0023] The present inventors addressed this need by carrying out whole genome sequencing of a large cohort of Pseudomonas clinical isolates and comparing the genetic mutation profile to classical culture based antimicrobial susceptibility testing with the goal to develop a test which can be used to detect bacterial susceptibility/resistance against antimicrobial drugs using molecular testing.

[0024] The inventors performed extensive studies on the genome of bacteria of Pseudomonas species either susceptible or resistant to antimicrobial, e.g. antibiotic, drugs. Based on this information, it is now possible to provide a detailed analysis on the resistance pattern of Pseudomonas strains based on individual genes or mutations on a nucleotide level. This analysis involves the identification of a resistance against individual antimicrobial, e.g. antibiotic, drugs as well as clusters of them. This allows not only for the determination of a resistance to a single antimicrobial, e.g. antibiotic, drug, but also to groups of antimicrobial drugs, e.g. antibiotics such as lactam or quinolone antibiotics, or even to all relevant antibiotic drugs.

[0025] Therefore, the present invention will considerably facilitate the selection of an appropriate antimicrobial, e.g. antibiotic, drug for the treatment of a Pseudomonas infection in a patient and thus will largely improve the quality of diagnosis and treatment.

[0026] According to a first aspect, the present invention discloses a diagnostic method of determining an infection of a patient with Pseudomonas species potentially resistant to antimicrobial drug treatment, which can be also described as a method of determining an antimicrobial drug, e.g. antibiotic, resistant Pseudomonas infection of a patient, comprising the steps of:

[0027] a) obtaining or providing a sample containing or suspected of containing at least one Pseudomonas species from the patient;

[0028] b) determining the presence of at least one mutation in at least two genes from the group of genes listed in Table 1 or Table 2 below, wherein the presence of said at least two mutations is indicative of an infection with an antimicrobial drug resistant, e.g. antibiotic resistant, Pseudomonas strain in said patient.

[0029] An infection of a patient with Pseudomonas species potentially resistant to antimicrobial drug treatment herein means an infection of a patient with Pseudomonas species wherein it is unclear if the Pseudomonas species is susceptible to treatment with a specific antimicrobial drug or if it is resistant to the antimicrobial drug.

[0030] In step b) above, as well as corresponding steps, at least one mutation in at least two genes is determined, so that in total at least two mutations are determined, wherein the two mutations are in different genes.

TABLE 1
List of genes

| | | | | |
|---|---|---|---|---|
| SCV20265_1892 | SCV20265_5625 | SCV20265_1467 | SCV20265_5607 | SCV20265_3294 |
| SCV20265_1879 | SCV20265_5242 | SCV20265_2224 | SCV20265_0530 | SCV20265_3289 |
| SCV20265_1858 | SCV20265_2193 | SCV20265_6274 | SCV20265_2958 | SCV20265_3248 |
| SCV20265_1132 | SCV20265_1451 | SCV20265_6120 | SCV20265_4839 | SCV20265_2195 |
| SCV20265_0968 | SCV20265_2464 | SCV20265_2518 | SCV20265_2654 | SCV20265_3101 |
| SCV20265_3909 | SCV20265_2610 | SCV20265_1805 | SCV20265_4445 | SCV20265_2883 |
| SCV20265_2916 | SCV20265_1721 | SCV20265_3099 | SCV20265_1735 | SCV20265_6289 |
| SCV20265_2974 | SCV20265_2404 | SCV20265_6135 | SCV20265_3626 | SCV20265_1050 |
| SCV20265_0188 | SCV20265_5329 | SCV20265_2792 | SCV20265_1617 | SCV20265_2236 |
| SCV20265_0491 | SCV20265_2422 | SCV20265_5463 | SCV20265_5597 | SCV20265_0241 |

TABLE 2
List of genes

| | | | | |
|---|---|---|---|---|
| SCV20265_1892 | SCV20265_5625 | SCV20265_1467 | SCV20265_5607 | SCV20265_3294 |
| SCV20265_1879 | SCV20265_5242 | SCV20265_2224 | SCV20265_0530 | SCV20265_3289 |
| SCV20265_1858 | SCV20265_2193 | SCV20265_6274 | SCV20265_2958 | SCV20265_3248 |
| SCV20265_1132 | SCV20265_1451 | SCV20265_6120 | SCV20265_4839 | SCV20265_2195 |
| SCV20265_0968 | SCV20265_2464 | SCV20265_2518 | SCV20265_2654 | SCV20265_3101 |
| SCV20265_3909 | SCV20265_2610 | SCV20265_1805 | SCV20265_4445 | SCV20265_2883 |
| SCV20265_2916 | SCV20265_1721 | SCV20265_3099 | SCV20265_1735 | SCV20265_6289 |
| SCV20265_2974 | SCV20265_2404 | SCV20265_6135 | SCV20265_3626 | SCV20265_1050 |
| SCV20265_0188 | SCV20265_5329 | SCV20265_2792 | SCV20265_1617 | SCV20265_2236 |
| SCV20265_0491 | SCV20265_2422 | SCV20265_5463 | SCV20265_5597 | SCV20265_0241 |

[0031] According to a second aspect, the present invention relates to a method of selecting a treatment of a patient suffering from an infection with a potentially resistant Pseudomonas strain, e.g. from an antimicrobial drug, e.g. antibiotic, resistant Pseudomonas infection, comprising the steps of:

[0032] a) obtaining or providing a sample containing or suspected of containing at least one Pseudomonas species from the patient;

[0033] b) determining the presence of at least one mutation in at least two genes from the group of genes listed in Table 1 or Table 2 above, wherein the presence of said at least two mutations is indicative of a resistance to one or more antimicrobial, e.g. antibiotic, drugs;

[0034] c) identifying said at least one or more antimicrobial, e.g. antibiotic, drugs; and

[0035] d) selecting one or more antimicrobial, e.g. antibiotic, drugs different from the ones identified in step c) and being suitable for the treatment of a Pseudomonas infection.

[0036] A third aspect of the present invention relates to a method of determining an antimicrobial drug, e.g. antibiotic, resistance profile for bacterial microorganisms of Pseudomonas species, comprising:

[0037] obtaining or providing a first data set of gene sequences of a plurality of clinical isolates of Pseudomonas species; providing a second data set of antimicrobial drug, e.g. antibiotic, resistance of the plurality of clinical isolates of Pseudomonas species;

[0038] aligning the gene sequences of the first data set to at least one, preferably one, reference genome of Pseudomonas, and/or assembling the gene sequence of the first data set, at least in part;

[0039] analyzing the gene sequences of the first data set for genetis variants to obtain a third data set of genetic variants;

[0040] correlating the third data set with the second data set and statistically analyzing the correlation; and

[0041] determining the genetic sites in the genome of Pseudomonas associated with antimicrobial drug, e.g. antibiotic, resistance.

[0042] In addition, the present invention relates in a fourth aspect to a method of determining an antimicrobial drug, e.g. antibiotic, resistance profile for a bacterial microorganism belonging to the species Pseudomonas comprising the steps of

[0043] a) obtaining or providing a sample containing or suspected of containing the bacterial microorganism;

[0044] b) determining the presence of a mutation in at least one gene of the bacterial microorganism as determined by the method according to the third aspect of the present invention;

[0045] wherein the presence of a mutation is indicative of a resistance to an antimicrobial, e.g. antibiotic, drug.

[0046] Furthermore, the present invention discloses in a fifth aspect a diagnostic method of determining an infection of a patient with Pseudomonas species potentially resistant to anti-microbial drug treatment, which can, like in the first aspect, also be described as method of determining an antimicrobial drug, e.g. antibiotic, resistant Pseudomonas infection of a patient, comprising the steps of:

[0047] a) obtaining or providing a sample containing or suspected of containing a bacterial microorganism belonging to the species Pseudomonas from the patient;

[0048] b) determining the presence of at least one mutation in at least one gene of the bacterial microorganism belonging to the species Pseudomonas as determined by the method according to the third aspect of the present invention, wherein the presence of said at least one mutation is indicative of an antimicrobial drug, e.g. antibiotic, resistant Pseudomonas infection in said patient.

[0049] Also disclosed is in a sixth aspect a method of selecting a treatment of a patient suffering from an infection with a potentially resistant Pseudomonas strain, e.g. from an antimicrobial drug, e.g. antibiotic, resistant Pseudomonas infection, comprising the steps of:

[0050] a) obtaining or providing a sample containing or suspected of containing a bacterial microorganism belonging to the species Pseudomonas from the patient;

[0051] b) determining the presence of at least one mutation in at least one gene of the bacterial microorganism belonging to the species Pseudomonas as determined by the method according to the third aspect of the present invention, wherein the presence of said at least one mutation is indicative of a resistance to one or more antimicrobial, e.g. antibiotic, drugs;

[0052] c) identifying said at least one or more antimicrobial, e.g. antibiotic, drugs; and

[0053] d) selecting one or more antimicrobial, e.g. antibiotic, drugs different from the ones identified in step c) and being suitable for the treatment of a Pseudomonas infection.

[0054] A seventh aspect of the present invention relates to a method of acquiring, respectively determining, an antimicrobial drug, e.g. antibiotic, resistance profile for a bacterial microorganism of Pseudomonas species, comprising:

[0055] obtaining or providing a first data set of gene sequences of a clinical isolate of Pseudomonas species;

[0056] providing a second data set of antimicrobial drug, e.g. antibiotic, resistance of a plurality of clinical isolates of Pseudomonas species;

[0057] aligning the gene sequences of the first data set to at least one, preferably one, reference genome of Pseudomonas, and/or assembling the gene sequence of the first data set, at least in part;

[0058] analyzing the gene sequences of the first data set for genetic variants to obtain a third data set of genetic variants of the first data set;

[0059] correlating the third data set with the second data set and statistically analyzing the correlation; and

[0060] determining the genetic sites in the genome of Pseudomonas of the first data set associated with antimicrobial drug, e.g. antibiotic, resistance.

[0061] According to an eighth aspect, the present invention discloses a computer program product comprising executable instructions which, when executed, perform a method according to the third, fourth, fifth, sixth or seventh aspect of the present invention.

[0062] Further aspects and embodiments of the invention are disclosed in the dependent claims and can be taken from the following description, figures and examples, without being limited thereto.

### FIGURES

[0063] The enclosed drawings should illustrate embodiments of the present invention and convey a further understanding thereof. In connection with the description they serve as explanation of concepts and principles of the invention. Other embodiments and many of the stated advantages can be derived in relation to the drawings. The elements of the drawings are not necessarily to scale towards each other. Identical, functionally equivalent and acting equal features and components are denoted in the figures of the drawings with the same reference numbers, unless noted otherwise.

[0064] FIG. 1 shows schematically a read-out concept for a diagnostic test according to a method of the present invention.

### DETAILED DESCRIPTION OF THE PRESENT INVENTION

### Definitions

[0065] Unless defined otherwise, technical and scientific terms used herein have the same meaning as commonly understood by one of ordinary skill in the art to which this invention belongs.

[0066] An “antimicrobial drug” in the present invention refers to a group of drugs that includes antibiotics, antifungals, antiprotozoals, and antivirals. According to certain embodiments, the antimicrobial drug is an antibiotic.

[0067] The term “nucleic acid molecule” refers to a polynucleotide molecule having a defined sequence. It comprises DNA molecules, RNA molecules, nucleotide analog molecules and combinations and derivatives thereof, such as DNA molecules or RNA molecules with incorporated nucleotide analogs or cDNA.

[0068] The term “nucleic acid sequence information” relates to information which can be derived from the sequence of a nucleic acid molecule, such as the sequence itself or a variation in the sequence as compared to a reference sequence.

[0069] The term “mutation” relates to a variation in the sequence as compared to a reference sequence. Such a reference sequence can be a sequence determined in a predominant wild type organism or a reference organism, e.g. a defined and known bacterial strain or substrain. A mutation is for example a deletion of one or multiple nucleotides, an insertion of one or multiple nucleotides, or substitution of one or multiple nucleotides, duplication of one or a sequence of multiple nucleotides, translocation of one or a sequence of multiple nucleotides, and, in particular, a single nucleotide polymorphism (SNP).

[0070] In the context of the present invention a “sample” is a sample which comprises at least one nucleic acid molecule from a bacterial microorganism. Examples for samples are: cells, tissue, body fluids, biopsy specimens, blood, urine, saliva, sputum, plasma, serum, cell culture supernatant, swab sample and others. According to certain embodiments, the sample is a patient sample (clinical isolate).

[0071] New and highly efficient methods of sequencing nucleic acids referred to as next generation sequencing have opened the possibility of large scale genomic analysis. The term “next generation sequencing” or “high throughput sequencing” refers to high-throughput sequencing technologies that parallelize the sequencing process, producing thousands or millions of sequences at once. Examples include Massively Parallel Signature Sequencing (MPSS), Polony sequencing, 454 pyrosequencing, Illumina (Solexa) sequencing, SOLiD sequencing, Ion semiconductor sequencing, DNA nanoball sequencing, Helioscope™ single molecule sequencing, Single Molecule SMRT™ sequencing, Single Molecule real time (RNAP) sequencing, Nanopore DNA sequencing, Sequencing By Hybridization, Amplicon Sequencing, GnuBio.

[0072] Within the present description the term “microorganism” comprises the term microbe. The type of microorganism is not particularly restricted, unless noted otherwise or obvious, and, for example, comprises bacteria, viruses, fungi, microscopic algae and protozoa, as well as combinations thereof. According to certain aspects, it refers to one or more Pseudomonas species, particularly Pseudomonas aeruginosa.

[0073] A reference to a microorganism or microorganisms in the present description comprises a reference to one microorganism as well a plurality of microorganisms, e.g. two, three, four, five, six or more microorganisms.

[0074] A vertebrate within the present invention refers to animals having a vertebrae, which includes mammals—including humans, birds, reptiles, amphibians and fishes. The present invention thus is not only suitable for human medicine, but also for veterinary medicine.

[0075] According to certain embodiments, the patient in the present methods is a vertebrate, more preferably a mammal and most preferred a human patient.

[0076] Before the invention is described in exemplary detail, it is to be understood that this invention is not limited to the particular component parts of the process steps of the methods described herein as such methods may vary. It is also to be understood that the terminology used herein is for purposes of describing particular embodiments only, and is not intended to be limiting. It must be noted that, as used in the specification and the appended claims, the singular forms “a,” “an” and “the” include singular and/or plural referents unless the context clearly dictates otherwise. For example, the term “a” as used herein can be understood as one single entity or in the meaning of “one or more” entities. It is also to be understood that plural forms include singular and/or plural referents unless the context clearly dictates otherwise. It is moreover to be understood that, in case parameter ranges are given which are delimited by numeric values, the ranges are deemed to include these limitation values.

[0077] Regarding the dosage of the antimicrobial, e.g. antibiotic, drugs, it is referred to the established principles of pharmacology in human and veterinary medicine. For example, Forth, Henschler, Rummel “Allgemeine und spezielle Pharmakologie und Toxikologie”, 9th edition, 2005, pp. 781-919, might be used as a guideline. Regarding the formulation of a ready-to-use medicament, reference is made to “Remington, The Science and Practice of Pharmacy”, 22^{nd} edition, 2013, pp. 777-1070.

[0078] Assembling of a gene sequence can be carried out by any known method and is not particularly limited.

[0079] According to certain embodiments, mutations that were found using alignments can also be compared or matched with alignment-free methods, e.g. for detecting single base exchanges, for example based on contigs that were found by assemblies. For example, reads obtained from sequencing can be assembled to contigs and the contigs can be compared to each other.

[0080] According to a first aspect, the present invention relates to a diagnostic method of determining an infection of a patient with Pseudomonas species potentially resistant to antimicrobial drug treatment, which can also be described as method of determining an antimicrobial drug, e.g. antibiotic, resistant Pseudomonas infection of a patient, comprising the steps of:

[0081] a) obtaining or providing a sample containing or suspected of containing at least one Pseudomonas species from the patient;

[0082] b) determining the presence of at least one mutation in at least two genes from the group of genes consisting of SCV20265_1892, SCV20265_5625, SCV20265_1467, SCV20265_5607, SCV20265_3294, SCV20265_1879, SCV20265_5242, SCV20265_2224, SCV20265_0530, SCV20265_3289, SCV20265_1858, SCV20265_2193, SCV20265_6274, SCV20265_2958, SCV20265_3248, SCV20265_1132, SCV20265_1451, SCV20265_6120, SCV20265_4839, SCV20265_2195, SCV20265_0968, SCV20265_2464, SCV20265_2518, SCV20265_2654, SCV20265_3101, SCV20265_3909, SCV20265_2610, SCV20265_1805, SCV20265_4445, SCV20265_2883, SCV20265_2916, SCV20265_1721, SCV20265_3099, SCV20265_1735, SCV20265_6289, SCV20265_2974, SCV20265_2404, SCV20265_6135, SCV20265_3626, SCV20265_1050, SCV20265_0188, SCV20265_5329, SCV20265_2792, SCV20265_1617, SCV20265_2236, SCV20265_0491, SCV20265_2422, SCV20265_5463, SCV20265_5597, and SCV20265_0241, preferably SCV20265_1467, SCV20265_5607, SCV20265_3294, SCV20265_1879, SCV20265_5242, SCV20265_2224, SCV20265_0530, SCV20265_3289, SCV20265_1858, SCV20265_2193, SCV20265_6274, SCV20265_2958, SCV20265_3248, SCV20265_1132, SCV20265_1451, SCV20265_6120, SCV20265_4839, SCV20265_2195, SCV20265_0968, SCV20265_2464, SCV20265_2518, SCV20265_2654, SCV20265_3101, SCV20265_3909, SCV20265_2610, SCV20265_1805, SCV20265_4445, SCV20265_2883, SCV20265_2916, SCV20265_1721, SCV20265_3099, SCV20265_1735, SCV20265_6289, SCV20265_2974, SCV20265_2404, SCV20265_6135, SCV20265_3626, SCV20265_1050, SCV20265_0188, SCV20265_5329, SCV20265_2792, SCV20265_1617, SCV20265_2236, SCV20265_0491, SCV20265_2422, SCV20265_5463, SCV20265_5597, and SCV20265_0241, wherein the presence of said at least two mutations is indicative of an infection with an antimicrobial, e.g. antibiotic, resistant Pseudomonas strain in said patient.

[0083] In this method, as well as the other methods of the invention, the sample can be provided or obtained in any way, preferably non-invasive, and can be e.g. provided as an in vitro sample or prepared as in vitro sample.

[0084] According to certain aspects, mutations in at least two, three, four, five, six, seven, eight, nine or ten genes are determined in any of the methods of the present invention, e.g. in at least two genes or in at least three genes. Instead of testing only single genes or mutants, a combination of several variant positions can improve the prediction accuracy and further reduce false positive findings that are influenced by other factors. Therefore, it is in particular preferred to determine the presence of a mutation in 2, 3, 4, 5, 6, 7, 8 or 9 (or more) genes selected from Table 1 or 2.

[0085] For the above genes, i.e. the genes also denoted in Tables 1 and 2, the highest probability of a resistance to at least one antimicrobial drug, e.g. antibiotic, could be observed, with p-values smaller than 10⁻³⁰, particularly smaller than 10⁻³⁵, further particularly smaller than 10⁻⁴⁰, indicating the high significance of the values (n=1104; α=0.05). Details regarding Tables 1 and 2 can be taken from Tables 3 and 4 (4a, 4b, 4c) disclosed in the Examples. Having at least two genes with mutations determined, a high probability of an antimicrobial drug, e.g. antibiotic, resistance could be determined. The genes in Table 1 thereby represent the 50 best genes for which a mutation was observed in the genomes of Pseudomonas species, whereas the genes in Table 2 represent the 50 best genes for which a cross-correlation could be observed for the antimicrobial drug, e.g. antibiotic, susceptibility testing for Pseudomonas species as described below.

[0086] According to certain embodiments, the obtaining or providing a sample containing or suspected of containing at least one Pseudomonas species from the patient in this method—as well as the other methods of the invention—can comprise the following:

[0087] A sample of a vertebrate, e.g. a human, e.g. is provided or obtained and nucleic acid sequences, e.g. DNA or RNA sequences, are recorded by a known method for recording nucleic acid, which is not particularly limited. For example, nucleic acid can be recorded by a sequencing method, wherein any sequencing method is appropriate, particularly sequencing methods wherein a multitude of sample components, as e.g. in a blood sample, can be analyzed for nucleic acids and/or nucleis acid fragments and/or parts thereof contained therein in a short period of time, including the nucleic acids and/or nucleic acid fragments and/or parts thereof of at least one microorganism of interest, particularly of at least one Pseudomonas species. For example, sequencing can be carried out using polymerase chain reaction (PCR), particularly multiplex PCR, or high throughput sequencing or next generation sequencing, preferably using high-throughput sequencing. For sequencing, preferably an in vitro sample is used.

[0088] The data obtained by the sequencing can be in any format, and can then be used to identify the nucleic acids, and thus genes, of the microorganism, e.g. of Pseudomonas species, to be identified, by known methods, e.g. fingerprinting methods, comparing genomes and/or aligning to at least one, or more, genomes of one or more species of the microorganism of interest, i.e. a reference genome, etc., forming a third data set of aligned genes for a Pseudomonas species—discarding additional data from other sources, e.g. the vertebrate. Reference genomes are not particularly limited and can be taken from several databases. Depending on the microorganism, different reference genomes or more than one reference genomes can be used for aligning. Using the reference genome—as well as also the data from the genomes of the other species, e.g. Pseudomonas species—mutations in the genes for each species and for the whole multitude of samples of different species, e.g. Pseudomonas species, can be obtained.

[0089] For example, it is useful in genome-wide association studies to reference the points of interest, e.g. mutations, to one constant reference for enhanced standardization. In case of the human with a high consistency of the genome and 99% identical sequences among individuals this is easy and represents the standard, as corresponding reference genomes are available in databases. In case of organisms that trigger infectious diseases (e.g. bacteria and viruses) this is much more difficult, though. One possibility is to fall back on a virtual pan genome which contains all sequences of a certain genus. A further possibility is the analysis of all available references, which is much more complex. Therein all n references from a database (e.g. RefSeq) are extracted and compared with the newly sequenced bacterial genomes k. After this, matrices (% of mapped reads, % of covered genome) are applied to estimate which reference is best suited to all new bacteria. However, n×k complete alignments are carried out. Having a big number of references, though, stable results can be obtained, as is the case for Pseudomonas.

[0090] According to certain embodiments, the genomes of Pseudomonas species are referenced to one reference genome. However, it is not excluded that for other microorganisms more than one reference genome is used. In the present methods, the reference genome of Pseudomonas is NC_023149 as annotated at the NCBI according to certain embodiments. The reference genome is attached to this application as sequence listing with SEQ ID NO 1.

[0091] The reference sequence was obtained from Pseudomonas strain NC_023149 (http://www.genome.jp/dbget-bin/www_bget?refseq+NC_023149)

[0092] LOCUS NC_023149 6725183 bp DNA circular CON 7 Feb. 2015

[0093] DEFINITION Pseudomonas aeruginosa SCV20265, complete genome.

| | |
|---|---|
| ACCESSION | NC_023149 |
| VERSION | NC_023149.1 GI: 568306739 |
| DBLINK | BioProject: PRJNA224116 |
| | BioSample: SAMN02415141 |
| | Assembly: GCF_000510305.1 |
| KEYWORDS | RefSeq. |
| SOURCE | Pseudomonas aeruginosa SCV20265 |
| ORGANISM | Pseudomonas aeruginosa SCV20265 |
| | Bacteria; Proteobacteria; Gammaproteobacteria; |
| | Pseudomonadales; Pseudomonadaceae; Pseudomonas. |
| REFERENCE | 1 (bases 1 to 6725183) |
| AUTHORS | Eckweiler, D., Bunk, B., Sproer, C., Overmann, J. |
| | and Haussler, S. |
| TITLE | Complete Genome Sequence of Highly Adherent |
| | Pseudomonas aeruginosa Small-Colony Variant |
| | SCV20265 |
| JOURNAL | Genome Announc 2 (1) (2014) |
| PUBMED | 24459283 |
| REMARK | Publication Status: Online-Only |
| REFERENCE | 2 (bases 1 to 6725183) |
| AUTHORS | Eckweiler, D., Bunk, B., Overmann, J. and |
| | Haeussler, S. |
| TITLE | Direct Submission |
| JOURNAL | Submitted (2 DEC. 2013) Bioinformatics, Leibniz |
| | Institute DSMZ-German Collection of Microorganisms |
| | and Cell Cultures, Inhoffenstr. 7B, Braunschweig |
| | 38124, Germany |

[0094] Alternatively or in addition, the gene sequence of the first data set can be assembled, at least in part, with known methods, e.g. by de-novo assembly or mapping assembly. The sequence assembly is not particularly limited, and any known genome assembler can be used, e.g. based on Sanger, 454, Solexa, Illumina, SOLid technologies, etc., as well as hybrids/mixtures thereof.

[0095] According to certain embodiments, the data of nucleic acids of different origin than the microorganism of interest, e.g. Pseudomonas species, can be removed after the nucleic acids of interest are identified, e.g. by filtering the data out. Such data can e.g. include nucleic acids of the patient, e.g. the vertebrate, e.g. human, and/or other microorganisms, etc. This can be done by e.g. computational subtraction, as developed by Meyerson et al. 2002. For this, also aligning to the genome of the vertebrate, etc., is possible. For aligning, several alignment-tools are available. This way the original data amount from the sample can be drastically reduced.

[0096] Also after such removal of “excess” data, fingerprinting and/or aligning, and/or assembly, etc. can be carried out, as described above, forming a third data set of aligned and/or assembled genes for a Pseudomonas species.

[0097] Using these techniques, genes with mutations of the microorganism of interest, e.g. Pseudomonas species, can be obtained for various species.

[0098] When testing these same species for antimicrobial drug, e.g. antibiotic, susceptibility of a number of antimicrobial drugs, e.g. antibiotics, e.g. using standard culturing methods on dishes with antimicrobial drug, e.g. antibiotic, in-take, as e.g. described below, the results of these antimicrobial drug, e.g. antibiotic, susceptibility tests can then be cross-referenced/correlated with the mutations in the genome of the respective microorganism, e.g. Pseudomonas. Using several, e.g. 50 or more than 50, 100 or more than 100, 200 or more than 200, 300 or more than 300, 400 or more than 400, or 500 or more than 500, e.g. 1000 or more than 1000, e.g. 1100 or more than 1100 different species of a microorganism, e.g. different Pseudomonas species, statistical analysis can be carried out on the obtained cross-referenced data between mutations and antimicrobial drug, e.g. antibiotic, susceptibility for these number of species, using known methods.

[0099] Regarding culturing methods, samples can be e.g. cultured overnight. On the next day individual colonies can be used for identification of organisms, either by culturing or using mass spectroscopy. Based on the identity of organisms new plates containing increasing concentration of antibiotics used for the treatment of these organisms are inoculated and grown for additional 12-24 hours. The lowest drug concentration which inhibits growth (minimal inhibitory concentration—MIC) can be used to determine susceptibility/resistance for tested antibiotics.

[0100] Correlation of the nucleic acid/gene mutations with antimicrobial drug, e.g. antibiotic, resistance can be carried out in a usual way and is not particularly limited. For example, resistances can be correlated to certain genes or certain mutations, e.g. SNPs, in genes. After correlation, statistical analysis can be carried out.

[0101] In addition, statistical analysis of the correlation of the gene mutations with antimicrobial drug, e.g. antibiotic, resistance is not particularly limited and can be carried out, depending on e.g. the amount of data, in different ways, for example using analysis of variance (ANOVA) or Student's t-test, for example with a sample size n of 50 or more, 100 or more, 200 or more, 300 or more, 400 or more, 500 or more, e.g. 1000 or more or 1100 or more, and a level of significance (α-error-level) of e.g. 0.05 or smaller, e.g. 0.05, preferably 0.01 or smaller. A statistical value can be obtained for each gene and/or each position in the genome as well as for all antibiotics tested, a group of antibiotics or a single antibiotic. The obtained p-values can also be adapted for statistical errors, if needed.

[0102] For statistically sound results a multitude of individuals should be sampled, with n=50, 100, 200, 300, 400 or 500, e.g. 1000 or 1100, and a level of significance (a-error-level) of e.g. 0.05 or smaller, e.g. 0.05, preferably 0.01 or smaller. According to certain embodiments, particularly significant results can be obtained for n=200, 300, 400 or 500, e.g. 1000 or 1100.

[0103] For statistically sound results a multitude of individuals should be sampled, with n=50 or more, 100 or more, 200 or more, 300 or more, 400 or more or 500 or more, e.g. 1000 or more or 1100 or more, and a level of significance (α-error-level) of e.g. 0.05 or smaller, e.g. 0.05, preferably 0.01 or smaller. According to certain embodiments, particularly significant results can be obtained for n=200 or more, 300 or more, 400 or more or 500 or more, e.g. 1000 or more or 1100 or more.

[0104] After the above procedure has been carried out for more than 1100, e.g. 1104, individual species of Pseudomonas, the data disclosed in Tables 1 and 2 were obtained for the statistically best correlations between gene mutations and antimicrobial drug, e.g. antibiotic, resistances. Thus, mutations in these genes were proven as valid markers for antimicrobial drug, e.g. antibiotic, resistance.

[0105] According to a further aspect, the present invention relates in a second aspect to a method of selecting a treatment of a patient suffering from an infection with a potentially resistant Pseudomonas strain, e.g. from an antimicrobial drug, e.g. antibiotic, resistant Pseudomonas infection, comprising the steps of:

[0106] a) obtaining or providing a sample containing or suspected of containing at least one Pseudomonas species from the patient;

[0107] b) determining the presence of at least one mutation in at least two genes from the group of genes consisting of SCV20265_1892, SCV20265_5625, SCV20265_1467, SCV20265_5607, SCV20265_3294, SCV20265_1879, SCV20265_5242, SCV20265_2224, SCV20265_0530, SCV20265_3289, SCV20265_1858, SCV20265_2193, SCV20265_6274, SCV20265_2958, SCV20265_3248, SCV20265_1132, SCV20265_1451, SCV20265_6120, SCV20265_4839, SCV20265_2195, SCV20265_0968, SCV20265_2464, SCV20265_2518, SCV20265_2654, SCV20265_3101, SCV20265_3909, SCV20265_2610, SCV20265_1805, SCV20265_4445, SCV20265_2883, SCV20265_2916, SCV20265_1721, SCV20265_3099, SCV20265_1735, SCV20265_6289, SCV20265_2974, SCV20265_2404, SCV20265_6135, SCV20265_3626, SCV20265_1050, SCV20265_0188, SCV20265_5329, SCV20265_2792, SCV20265_1617, SCV20265_2236, SCV20265_0491, SCV20265_2422, SCV20265_5463, SCV20265_5597, and SCV20265_0241, preferably SCV20265_1467, SCV20265_5607, SCV20265_3294, SCV20265_1879, SCV20265_5242, SCV20265_2224, SCV20265_0530, SCV20265_3289, SCV20265_1858, SCV20265_2193, SCV20265_6274, SCV20265_2958, SCV20265_3248, SCV20265_1132, SCV20265_1451, SCV20265_6120, SCV20265_4839, SCV20265_2195, SCV20265_0968, SCV20265_2464, SCV20265_2518, SCV20265_2654, SCV20265_3101, SCV20265_3909, SCV20265_2610, SCV20265_1805, SCV20265_4445, SCV20265_2883, SCV20265_2916, SCV20265_1721, SCV20265_3099, SCV20265_1735, SCV20265_6289, SCV20265_2974, SCV20265_2404, SCV20265_6135, SCV20265_3626, SCV20265_1050, SCV20265_0188, SCV20265_5329, SCV20265_2792, SCV20265_1617, SCV20265_2236, SCV20265_0491, SCV20265_2422, SCV20265_5463, SCV20265_5597, and SCV20265_0241, wherein the presence of said at least two mutations is indicative of a resistance to one or more antimicrobial, e.g. antibiotic, drugs;

[0108] c) identifying said at least one or more antimicrobial, e.g. antibiotic, drugs; and

[0109] d) selecting one or more antimicrobial, e.g. antibiotic, drugs different from the ones identified in step c) and being suitable for the treatment of a Pseudomonas infection.

[0110] In this method, the steps a) of obtaining or providing a sample and b) of determining the presence of at least one mutation are as in the method of the first aspect.

[0111] The identification of the at least one or more antimicrobial, e.g. antibiotic, drug in step c) is then based on the results obtained in step b) and corresponds to the antimicrobial, e.g. antibiotic, drug(s) that correlate(s) with the mutations. Once these antimicrobial drugs, e.g. antibiotics, are ruled out, the remaining antimicrobial drugs, e.g. antibiotic drugs/antibiotics, can be selected in step d) as being suitable for treatment.

[0112] In the description, references to the first and second aspect also apply to the 14^{th}, 15^{th}, 16^{th} and 17^{th} aspect, referring to the same genes, unless clear from the context that they don't apply.

[0113] According to certain embodiments in the method of the first or second aspect, at least a mutation in SCV20265_1892 and/or SCV20265_5625, particularly in positions 1979239 and/or 5987559, respectively, with regard to reference genome NC 023149 as annotated at the NCBI, is determined. For such mutations, a particularly relevant correlation with antimicrobial drug, e.g. antibiotic, resistance could be determined. In particular, the mutation in position 1979239 with regard to reference genome NC_023149 as annotated at the NCBI is a non-synonymous coding, particularly a codon change aCc/aTc;aCc/aAc, and the mutation in position 5987559 with regard to reference genome NC_023149 as annotated at the NCBI is a non-synonymous coding, particularly a codon change tCg/tTg;tCg/tGg.

[0114] According to certain embodiments, the antimicrobial drug, e.g. antibiotic, in the method of the first or second aspect, as well as in the other methods of the invention, is at least one selected from the group of β-lactams, β-lactam inhibitors, quinolines and derivatives thereof, aminoglycosides, polyketides, respectively tetracyclines, and folate synthesis inhibitors.

[0115] In the methods of the invention the resistance of Pseudomonas to one or more antimicrobial, e.g. antibiotic, drugs can be determined according to certain embodiments.

[0116] According to certain embodiments, the antimicrobial drug is an antibiotic/antibiotic drug.

[0117] According to certain embodiments of the first and/or second aspect of the invention the antimicrobial, e.g. antibiotic, drug is selected from lactam antibiotics, and the presence of a mutation in the following genes is determined:

[0118] SCV20265_1892, SCV20265_5625, SCV20265_1467, SCV20265_5607, SCV20265_1879, SCV20265_5242, SCV20265_2224, SCV20265_0530, SCV20265_3289, SCV20265_1858, SCV20265_2193, SCV20265_6274, SCV20265_2958, SCV20265_3248, SCV20265_1451, SCV20265_6120, SCV20265_4839, SCV20265_2195, SCV20265_0968, SCV20265_2464, SCV20265_2518, SCV20265_2654, SCV20265_3101, SCV20265_1805, SCV20265_4445, SCV20265_2883, SCV20265_1721, SCV20265_3099, SCV20265_1735, SCV20265_6289, SCV20265_2974, SCV20265_6135, SCV20265_3626, SCV20265_1050, SCV20265_5329, SCV20265_2792, and/or SCV20265_2236, preferably SCV20265_1467, SCV20265_5607, SCV20265_1879, SCV20265_5242, SCV20265_2224, SCV20265_0530, SCV20265_3289, SCV20265_1858, SCV20265_2193, SCV20265_6274, SCV20265_2958, SCV20265_3248, SCV20265_1451, SCV20265_6120, SCV20265_4839, SCV20265_2195, SCV20265_0968, SCV20265_2464, SCV20265_2518, SCV20265_2654, SCV20265_3101, SCV20265_1805, SCV20265_4445, SCV20265_2883, SCV20265_1721, SCV20265_3099, SCV20265_1735, SCV20265_6289, SCV20265_2974, SCV20265_6135, SCV20265_3626, SCV20265_1050, SCV20265_5329, SCV20265_2792, and/or SCV20265_2236.

[0119] According to certain embodiments of the first and/or second aspect of the invention the antimicrobial, e.g. antibiotic, drug is selected from quinolone antibiotics, e.g. fluoroquinolone antibiotics, and the presence of a mutation in the following genes is determined: SCV20265_1892, SCV20265_5625, SCV20265_1467, SCV20265_5607, SCV20265_3294, SCV20265_1879, SCV20265_5242, SCV20265_2224, SCV20265_0530, SCV20265_3289, SCV20265_1858, SCV20265_2193, SCV20265_6274, SCV20265_2958, SCV20265_3248, SCV20265_1132, SCV20265_1451, SCV20265_6120, SCV20265_4839, SCV20265_2195, SCV20265_0968, SCV20265_2464, SCV20265_2518, SCV20265_2654, SCV20265_3101, SCV20265_3909, SCV20265_2610, SCV20265_1805, SCV20265_4445, SCV20265_2883, SCV20265_2916, SCV20265_1721, SCV20265_3099, SCV20265_1735, SCV20265_6289, SCV20265_2974, SCV20265_2404, SCV20265_6135, SCV20265_3626, SCV20265_1050, SCV20265_0188, SCV20265_5329, SCV20265_2792, SCV20265_1617, SCV20265_2236, SCV20265_0491, SCV20265_2422, SCV20265_5463, SCV20265_5597, and/or SCV20265_0241, preferably SCV20265_1467, SCV20265_5607, SCV20265_3294, SCV20265_1879, SCV20265_5242, SCV20265_2224, SCV20265_0530, SCV20265_3289, SCV20265_1858, SCV20265_2193, SCV20265_6274, SCV20265_2958, SCV20265_3248, SCV20265_1132, SCV20265_1451, SCV20265_6120, SCV20265_4839, SCV20265_2195, SCV20265_0968, SCV20265_2464, SCV20265_2518, SCV20265_2654, SCV20265_3101, SCV20265_3909, SCV20265_2610, SCV20265_1805, SCV20265_4445, SCV20265_2883, SCV20265_2916, SCV20265_1721, SCV20265_3099, SCV20265_1735, SCV20265_6289, SCV20265_2974, SCV20265_2404, SCV20265_6135, SCV20265_3626, SCV20265_1050, SCV20265_0188, SCV20265_5329, SCV20265_2792, SCV20265_1617, SCV20265_2236, SCV20265_0491, SCV20265_2422, SCV20265_5463, SCV20265_5597, and/or SCV20265_0241.

[0120] According to certain embodiments of the first and/or second aspect of the invention the antimicrobial, e.g. antibiotic, drug is selected from aminoglycoside antibiotics, and the presence of a mutation in the following genes is determined: SCV20265_1892, SCV20265_5625, SCV20265_1467, SCV20265_5607, SCV20265_3294, SCV20265_1879, SCV20265_5242, SCV20265_2224, SCV20265_0530, SCV20265_3289, SCV20265_1858, SCV20265_2193, SCV20265_6274, SCV20265_2958, SCV20265_3248, SCV20265_1132, SCV20265_1451, SCV20265_6120, SCV20265_4839, SCV20265_2195, SCV20265_0968, SCV20265_2464, SCV20265_2518, SCV20265_2654, SCV20265_3101, SCV20265_3909, SCV20265_2610, SCV20265_1805, SCV20265_4445, SCV20265_2883, SCV20265_2916, SCV20265_1721, SCV20265_3099, SCV20265_1735, SCV20265_6289, SCV20265_2974, SCV20265_2404, SCV20265_6135, SCV20265_3626, SCV20265_1050, SCV20265_0188, SCV20265_5329, SCV20265_2792, SCV20265_1617, SCV20265_2236, SCV20265_0491, SCV20265_2422, SCV20265_5463, SCV20265_5597, and/or SCV20265_0241, preferably SCV20265_1467, SCV20265_5607, SCV20265_3294, SCV20265_1879, SCV20265_5242, SCV20265_2224, SCV20265_0530, SCV20265_3289, SCV20265_1858, SCV20265_2193, SCV20265_6274, SCV20265_2958, SCV20265_3248, SCV20265_1132, SCV20265_1451, SCV20265_6120, SCV20265_4839, SCV20265_2195, SCV20265_0968, SCV20265_2464, SCV20265_2518, SCV20265_2654, SCV20265_3101, SCV20265_3909, SCV20265_2610, SCV20265_1805, SCV20265_4445, SCV20265_2883, SCV20265_2916, SCV20265_1721, SCV20265_3099, SCV20265_1735, SCV20265_6289, SCV20265_2974, SCV20265_2404, SCV20265_6135, SCV20265_3626, SCV20265_1050, SCV20265_0188, SCV20265_5329, SCV20265_2792, SCV20265_1617, SCV20265_2236, SCV20265_0491, SCV20265_2422, SCV20265_5463, SCV20265_5597, and/or SCV20265_0241.

[0121] According to certain embodiments of the first and/or second aspect of the invention the antimicrobial, e.g. antibiotic, drug is selected from other antibiotics ((benzene de-rived)/sulfonamide), and the presence of a mutation in the following genes is determined: SCV20265_1892, SCV20265_5625, SCV20265_1467, SCV20265_5607, SCV20265_3294, SCV20265_1879, SCV20265_5242, SCV20265_2224, SCV20265_0530, SCV20265_3289, SCV20265_1858, SCV20265_2193, SCV20265_6274, SCV20265_2958, SCV20265_3248, SCV20265_1132, SCV20265_1451, SCV20265_6120, SCV20265_4839, SCV20265_2195, SCV20265_0968, SCV20265_2464, SCV20265_2518, SCV20265_2654, SCV20265_3101, SCV20265_3909, SCV20265_2610, SCV20265_1805, SCV20265_4445, SCV20265_2883, SCV20265_2916, SCV20265_1721, SCV20265_3099, SCV20265_1735, SCV20265_6289, SCV20265_2974, SCV20265_2404, SCV20265_6135, SCV20265_3626, SCV20265_1050, SCV20265_0188, SCV20265_5329, SCV20265_2792, SCV20265_1617, SCV20265_2236, SCV20265_0491, SCV20265_2422, SCV20265_5463, SCV20265_5597, and/or SCV20265_0241, preferably SCV20265_1467, SCV20265_5607, SCV20265_3294, SCV20265_1879, SCV20265_5242, SCV20265_2224, SCV20265_0530, SCV20265_3289, SCV20265_1858, SCV20265_2193, SCV20265_6274, SCV20265_2958, SCV20265_3248, SCV20265_1132, SCV20265_1451, SCV20265_6120, SCV20265_4839, SCV20265_2195, SCV20265_0968, SCV20265_2464, SCV20265_2518, SCV20265_2654, SCV20265_3101, SCV20265_3909, SCV20265_2610, SCV20265_1805, SCV20265_4445, SCV20265_2883, SCV20265_2916, SCV20265_1721, SCV20265_3099, SCV20265_1735, SCV20265_6289, SCV20265_2974, SCV20265_2404, SCV20265_6135, SCV20265_3626, SCV20265_1050, SCV20265_0188, SCV20265_5329, SCV20265_2792, SCV20265_1617, SCV20265_2236, SCV20265_0491, SCV20265_2422, SCV20265_5463, SCV20265_5597, and/or SCV20265_0241.

[0122] According to certain embodiments of the first and/or second aspect of the invention, determining the nucleic acid sequence information or the presence of a mutation comprises determining the presence of a single nucleotide at a single position in a gene. Thus the invention comprises methods wherein the presence of a single nucleotide polymorphism or mutation at a single nucleotide position is detected.

[0123] According to certain embodiments, the antibiotic drug in the methods of the present invention is selected from the group consisting of Amoxicillin/K Clavulanate (AUG), Ampicillin (AM), Aztreonam (AZT), Cefazolin (CFZ), Cefepime (CPE), Cefotaxime (CFT), Ceftazidime (CAZ), Ceftriaxone (CAX), Cefuroxime (CRM), Cephalotin (CF), Ciprofloxacin (CP), Ertapenem (ETP), Gentamicin (GM), Imipenem (IMP), Levofloxacin (LVX), Meropenem (MER), Piperacillin/Tazobactam (P/T), Ampicillin/Sulbactam (A/S), Tetracycline (TE), Tobramycin (TO), and Trimethoprim/Sulfamethoxazole (T/S).

[0124] The inventors have surprisingly found that mutations in certain genes are indicative not only for a resistance to one single antimicrobial, e.g. antibiotic, drug, but to groups containing several drugs.

[0125] According to certain embodiments of the first and/or second aspect of the invention, the gene is from Table 1 or Table 2, the antibiotic drug is selected from lactam antibiotics and a mutation in at least one of the following genes is detected with regard to reference genome NC_023149: SCV20265_1892, SCV20265_5625, SCV20265_1467, SCV20265_5607, SCV20265_1879, SCV20265_5242, SCV20265_2224, SCV20265_0530, SCV20265_3289, SCV20265_1858, SCV20265_2193, SCV20265_6274, SCV20265_2958, SCV20265_3248, SCV20265_1451, SCV20265_6120, SCV20265_4839, SCV20265_2195, SCV20265_0968, SCV20265_2464, SCV20265_2518, SCV20265_2654, SCV20265_3101, SCV20265_1805, SCV20265_4445, SCV20265_2883, SCV20265_1721, SCV20265_3099, SCV20265_1735, SCV20265_6289, SCV20265_2974, SCV20265_6135, SCV20265_3626, SCV20265_1050, SCV20265_5329, SCV20265_2792, SCV20265_2236, preferably SCV20265_1467, SCV20265_5607, SCV20265_1879, SCV20265_5242, SCV20265_2224, SCV20265_0530, SCV20265_3289, SCV20265_1858, SCV20265_2193, SCV20265_6274, SCV20265_2958, SCV20265_3248, SCV20265_1451, SCV20265_6120, SCV20265_4839, SCV20265_2195, SCV20265_0968, SCV20265_2464, SCV20265_2518, SCV20265_2654, SCV20265_3101, SCV20265_1805, SCV20265_4445, SCV20265_2883, SCV20265_1721, SCV20265_3099, SCV20265_1735, SCV20265_6289, SCV20265_2974, SCV20265_6135, SCV20265_3626, SCV20265_1050, SCV20265_5329, SCV20265_2792, SCV20265_2236.

[0126] According to certain embodiments of the first and/or second aspect of the invention, the gene is from Table 1 or Table 2, the antibiotic drug is selected from quinolone antibiotics, e.g. fluoroquinolone antibiotics, and a mutation in at least one of the following genes is detected with regard to reference genome NC_023149: SCV20265_1892, SCV20265_5625, SCV20265_1467, SCV20265_5607, SCV20265_3294, SCV20265_1879, SCV20265_5242, SCV20265_2224, SCV20265_0530, SCV20265_3289, SCV20265_1858, SCV20265_2193, SCV20265_6274, SCV20265_2958, SCV20265_3248, SCV20265_1132, SCV20265_1451, SCV20265_6120, SCV20265_4839, SCV20265_2195, SCV20265_0968, SCV20265_2464, SCV20265_2518, SCV20265_2654, SCV20265_3101, SCV20265_3909, SCV20265_2610, SCV20265_1805, SCV20265_4445, SCV20265_2883, SCV20265_2916, SCV20265_1721, SCV20265_3099, SCV20265_1735, SCV20265_6289, SCV20265_2974, SCV20265_2404, SCV20265_6135, SCV20265_3626, SCV20265_1050, SCV20265_0188, SCV20265_5329, SCV20265_2792, SCV20265_1617, SCV20265_2236, SCV20265_0491, SCV20265_2422, SCV20265_5463, SCV20265_5597, SCV20265_0241, preferably SCV20265_1467, SCV20265_5607, SCV20265_3294, SCV20265_1879, SCV20265_5242, SCV20265_2224, SCV20265_0530, SCV20265_3289, SCV20265_1858, SCV20265_2193, SCV20265_6274, SCV20265_2958, SCV20265_3248, SCV20265_1132, SCV20265_1451, SCV20265_6120, SCV20265_4839, SCV20265_2195, SCV20265_0968, SCV20265_2464, SCV20265_2518, SCV20265_2654, SCV20265_3101, SCV20265_3909, SCV20265_2610, SCV20265_1805, SCV20265_4445, SCV20265_2883, SCV20265_2916, SCV20265_1721, SCV20265_3099, SCV20265_1735, SCV20265_6289, SCV20265_2974, SCV20265_2404, SCV20265_6135, SCV20265_3626, SCV20265_1050, SCV20265_0188, SCV20265_5329, SCV20265_2792, SCV20265_1617, SCV20265_2236, SCV20265_0491, SCV20265_2422, SCV20265_5463, SCV20265_5597, SCV20265_0241.

[0127] According to certain embodiments of the first and/or second aspect of the invention, the gene is from Table 1 or Table 2, the antibiotic drug is selected from aminoglycoside antibiotics and a mutation in at least one of the following genes is detected with regard to reference genome NC_023149: SCV20265_1892, SCV20265_5625, SCV20265_1467, SCV20265_5607, SCV20265_3294, SCV20265_1879, SCV20265_5242, SCV20265_2224, SCV20265_0530, SCV20265_3289, SCV20265_1858, SCV20265_2193, SCV20265_6274, SCV20265_2958, SCV20265_3248, SCV20265_1132, SCV20265_1451, SCV20265_6120, SCV20265_4839, SCV20265_2195, SCV20265_0968, SCV20265_2464, SCV20265_2518, SCV20265_2654, SCV20265_3101, SCV20265_3909, SCV20265_2610, SCV20265_1805, SCV20265_4445, SCV20265_2883, SCV20265_2916, SCV20265_1721, SCV20265_3099, SCV20265_1735, SCV20265_6289, SCV20265_2974, SCV20265_2404, SCV20265_6135, SCV20265_3626, SCV20265_1050, SCV20265_0188, SCV20265_5329, SCV20265_2792, SCV20265_1617, SCV20265_2236, SCV20265_0491, SCV20265_2422, SCV20265_5463, SCV20265_5597, SCV20265_0241, preferably SCV20265_1467, SCV20265_5607, SCV20265_3294, SCV20265_1879, SCV20265_5242, SCV20265_2224, SCV20265_0530, SCV20265_3289, SCV20265_1858, SCV20265_2193, SCV20265_6274, SCV20265_2958, SCV20265_3248, SCV20265_1132, SCV20265_1451, SCV20265_6120, SCV20265_4839, SCV20265_2195, SCV20265_0968, SCV20265_2464, SCV20265_2518, SCV20265_2654, SCV20265_3101, SCV20265_3909, SCV20265_2610, SCV20265_1805, SCV20265_4445, SCV20265_2883, SCV20265_2916, SCV20265_1721, SCV20265_3099, SCV20265_1735, SCV20265_6289, SCV20265_2974, SCV20265_2404, SCV20265_6135, SCV20265_3626, SCV20265_1050, SCV20265_0188, SCV20265_5329, SCV20265_2792, SCV20265_1617, SCV20265_2236, SCV20265_0491, SCV20265_2422, SCV20265_5463, SCV20265_5597, SCV20265_0241.

[0128] According to certain embodiments of the first and/or second aspect of the invention, the gene is from Table 1 or Table 2, the antibiotic drug is selected from other antibiotics ((benzene derived)/sulfonamide) and a mutation in at least one of the following genes is detected with regard to reference genome NC_023149: SCV20265_1892, SCV20265_5625, SCV20265_1467, SCV20265_5607, SCV20265_3294, SCV20265_1879, SCV20265_5242, SCV20265_2224, SCV20265_0530, SCV20265_3289, SCV20265_1858, SCV20265_2193, SCV20265_6274, SCV20265_2958, SCV20265_3248, SCV20265_1132, SCV20265_1451, SCV20265_6120, SCV20265_4839, SCV20265_2195, SCV20265_0968, SCV20265_2464, SCV20265_2518, SCV20265_2654, SCV20265_3101, SCV20265_3909, SCV20265_2610, SCV20265_1805, SCV20265_4445, SCV20265_2883, SCV20265_2916, SCV20265_1721, SCV20265_3099, SCV20265_1735, SCV20265_6289, SCV20265_2974, SCV20265_2404, SCV20265_6135, SCV20265_3626, SCV20265_1050, SCV20265_0188, SCV20265_5329, SCV20265_2792, SCV20265_1617, SCV20265_2236, SCV20265_0491, SCV20265_2422, SCV20265_5463, SCV20265_5597, SCV20265_0241, preferably SCV20265_1467, SCV20265_5607, SCV20265_3294, SCV20265_1879, SCV20265_5242, SCV20265_2224, SCV20265_0530, SCV20265_3289, SCV20265_1858, SCV20265_2193, SCV20265_6274, SCV20265_2958, SCV20265_3248, SCV20265_1132, SCV20265_1451, SCV20265_6120, SCV20265_4839, SCV20265_2195, SCV20265_0968, SCV20265_2464, SCV20265_2518, SCV20265_2654, SCV20265_3101, SCV20265_3909, SCV20265_2610, SCV20265_1805, SCV20265_4445, SCV20265_2883, SCV20265_2916, SCV20265_1721, SCV20265_3099, SCV20265_1735, SCV20265_6289, SCV20265_2974, SCV20265_2404, SCV20265_6135, SCV20265_3626, SCV20265_1050, SCV20265_0188, SCV20265_5329, SCV20265_2792, SCV20265_1617, SCV20265_2236, SCV20265_0491, SCV20265_2422, SCV20265_5463, SCV20265_5597, SCV20265_0241.

[0129] For specific antimicrobial drugs, e.g. antibiotics, specific positions in the above genes can be determined where a high statistical significance is observed. The inventors found that, apart from the above genes indicative of a resistance against antibiotics, also single nucleotide polymorphisms (=SNP's) may have a high significance for the presence of a resistance against defined antibiotic drugs. The analysis of these polymorphisms on a nucleotide level may further improve and accelerate the determination of a drug resistance to antimicrobial drugs, e.g. antibiotics, in Pseudomonas.

[0130] According to certain embodiments of the first and/or second aspect of the invention, the gene is from Table 1 or Table 2, the antibiotic drug is selected from lactam antibiotics and a mutation in at least one of the following nucleotide positions is detected with regard to reference genome NC_023149: 1979239, 5987559, 1537406, 5965080, 1967346, 5569783, 2350860, 562872, 3507580, 1947689, 2316386, 6685845, 3142437, 3468647, 1521674, 6520799, 5124971, 2317909, 1009933, 2567532, 2611669, 2754829, 3301233, 1899865, 4712288, 3019764, 1805165, 3299685, 1821163, 6702956, 3160788, 6535290, 3881624, 1099519, 5662982, 2903129, 2363393, 2350862, 3507601, 3507667, 6519971, preferably 1537406, 5965080, 1967346, 5569783, 2350860, 562872, 3507580, 1947689, 2316386, 6685845, 3142437, 3468647, 1521674, 6520799, 5124971, 2317909, 1009933, 2567532, 2611669, 2754829, 3301233, 1899865, 4712288, 3019764, 1805165, 3299685, 1821163, 6702956, 3160788, 6535290, 3881624, 1099519, 5662982, 2903129, 2363393, 2350862, 3507601, 3507667, 6519971.

[0131] According to certain embodiments of the first and/or second aspect of the invention, the gene is from Table 1 or Table 2, the antibiotic drug is selected from quinolone antibiotics, e.g. fluoroquinolone antibiotics, and a mutation in at least one of the following nucleotide positions is detected with regard to reference genome NC_023149: 1979239, 5987559, 1537406, 5965080, 3513162, 1967346, 5569783, 2350860, 562872, 3507580, 1947689, 2316386, 6685845, 3142437, 3468647, 1194383, 1521674, 6520799, 5124971, 2317909, 1009933, 2567532, 2611669, 2754829, 3301233, 4166792, 2709322, 1899865, 4712288, 3019764, 3068671, 1805165, 3299685, 1821163, 6702956, 3160788, 2515627, 6535290, 3881624, 1099519, 208902, 5662982, 2903129, 1701758, 2363393, 525701, 2530203, 5806684, 5954547, 261978, 2350862, 3507601, 3507667, 6519971, preferably 1537406, 5965080, 3513162, 1967346, 5569783, 2350860, 562872, 3507580, 1947689, 2316386, 6685845, 3142437, 3468647, 1194383, 1521674, 6520799, 5124971, 2317909, 1009933, 2567532, 2611669, 2754829, 3301233, 4166792, 2709322, 1899865, 4712288, 3019764, 3068671, 1805165, 3299685, 1821163, 6702956, 3160788, 2515627, 6535290, 3881624, 1099519, 208902, 5662982, 2903129, 1701758, 2363393, 525701, 2530203, 5806684, 5954547, 261978, 2350862, 3507601, 3507667, 6519971.

[0132] According to certain embodiments of the first and/or second aspect of the invention, the gene is from Table 1 or Table 2, the antibiotic drug is selected from aminoglycoside antibiotics and a mutation in at least one of the following nucleotide positions is detected with regard to reference genome NC_023149: 1979239, 5987559, 1537406, 5965080, 3513162, 1967346, 5569783, 2350860, 562872, 3507580, 1947689, 2316386, 6685845, 3142437, 3468647, 1194383, 1521674, 6520799, 5124971, 2317909, 1009933, 2567532, 2611669, 2754829, 3301233, 4166792, 2709322, 1899865, 4712288, 3019764, 3068671, 1805165, 3299685, 1821163, 6702956, 3160788, 2515627, 6535290, 3881624, 1099519, 208902, 5662982, 2903129, 1701758, 2363393, 525701, 2530203, 5806684, 5954547, 261978, 2350862, 3507601, 3507667, 6519971, preferably 1537406, 5965080, 3513162, 1967346, 5569783, 2350860, 562872, 3507580, 1947689, 2316386, 6685845, 3142437, 3468647, 1194383, 1521674, 6520799, 5124971, 2317909, 1009933, 2567532, 2611669, 2754829, 3301233, 4166792, 2709322, 1899865, 4712288, 3019764, 3068671, 1805165, 3299685, 1821163, 6702956, 3160788, 2515627, 6535290, 3881624, 1099519, 208902, 5662982, 2903129, 1701758, 2363393, 525701, 2530203, 5806684, 5954547, 261978, 2350862, 3507601, 3507667, 6519971.

[0133] According to certain embodiments of the first and/or second aspect of the invention, the gene is from Table 1 or Table 2, the antibiotic drug is selected from other antibiotics ((benzene derived)/sulfonamide) and a mutation in at least one of the following nucleotide positions is detected with regard to reference genome NC_023149: 1979239, 5987559, 1537406, 5965080, 3513162, 1967346, 5569783, 2350860, 562872, 3507580, 1947689, 2316386, 6685845, 3142437, 3468647, 1194383, 1521674, 6520799, 5124971, 2317909, 1009933, 2567532, 2611669, 2754829, 3301233, 4166792, 2709322, 1899865, 4712288, 3019764, 3068671, 1805165, 3299685, 1821163, 6702956, 3160788, 2515627, 6535290, 3881624, 1099519, 208902, 5662982, 2903129, 1701758, 2363393, 525701, 2530203, 5806684, 5954547, 261978, 2350862, 3507601, 3507667, 6519971, preferably 1537406, 5965080, 3513162, 1967346, 5569783, 2350860, 562872, 3507580, 1947689, 2316386, 6685845, 3142437, 3468647, 1194383, 1521674, 6520799, 5124971, 2317909, 1009933, 2567532, 2611669, 2754829, 3301233, 4166792, 2709322, 1899865, 4712288, 3019764, 3068671, 1805165, 3299685, 1821163, 6702956, 3160788, 2515627, 6535290, 3881624, 1099519, 208902, 5662982, 2903129, 1701758, 2363393, 525701, 2530203, 5806684, 5954547, 261978, 2350862, 3507601, 3507667, 6519971.

[0134] According to certain embodiments of the first and/or second aspect of the invention, the antibiotic drug is T/S, CP, LVX, GM, and/or TO and a mutation in at least one of the following nucleotide positions is detected with regard to reference genome NC_023149: 1979239, 5987559, 1537406, 5965080, 3513162, 1967346, 5569783, 2350860, 562872, 3507580, 1947689, 2316386, 6685845, 3142437, 3468647, 1194383, 1521674, 6520799, 5124971, 2317909, 1009933, 2567532, 2611669, 2754829, 3301233, 4166792, 2709322, 1899865, 4712288, 3019764, 3068671, 1805165, 3299685, 1821163, 6702956, 3160788, 2515627, 6535290, 3881624, 1099519, 208902, 5662982, 2903129, 1701758, 2363393, 525701, 2530203, 5806684, 5954547, 261978, 2350862, 3507601, 3507667, 6519971, preferably 1537406, 5965080, 3513162, 1967346, 5569783, 2350860, 562872, 3507580, 1947689, 2316386, 6685845, 3142437, 3468647, 1194383, 1521674, 6520799, 5124971, 2317909, 1009933, 2567532, 2611669, 2754829, 3301233, 4166792, 2709322, 1899865, 4712288, 3019764, 3068671, 1805165, 3299685, 1821163, 6702956, 3160788, 2515627, 6535290, 3881624, 1099519, 208902, 5662982, 2903129, 1701758, 2363393, 525701, 2530203, 5806684, 5954547, 261978, 2350862, 3507601, 3507667, 6519971.

[0135] According to certain embodiments of the first and/or second aspect of the invention, the antibiotic drug is CPE and a mutation in at least one of the following nucleotide positions is detected with regard to reference genome NC_023149: 1979239, 5987559, 1537406, 5569783, 562872, 3507580, 1947689, 2316386, 6685845, 3142437, 3468647, 1521674, 6520799, 5124971, 2317909, 1009933, 2567532, 2611669, 2754829, 1899865, 4712288, 1805165, 1821163, 6702956, 3160788, 6535290, 3881624, 1099519, 5662982, 2903129, 2363393, 3507601, 3507667, 6519971, preferably 1537406, 5569783, 562872, 3507580, 1947689, 2316386, 6685845, 3142437, 3468647, 1521674, 6520799, 5124971, 2317909, 1009933, 2567532, 2611669, 2754829, 1899865, 4712288, 1805165, 1821163, 6702956, 3160788, 6535290, 3881624, 1099519, 5662982, 2903129, 2363393, 3507601, 3507667, 6519971.

[0136] According to certain embodiments of the first and/or second aspect of the invention, the antibiotic drug is P/T and a mutation in at least one of the following nucleotide positions is detected with regard to reference genome NC_023149: 1979239, 5987559, 1537406, 5965080, 1967346, 2350860, 2754829, 3301233, 3019764, 6702956, 3881624, 2350862, preferably 1537406, 5965080, 1967346, 2350860, 2754829, 3301233, 3019764, 6702956, 3881624, 2350862, preferably 1537406, 5965080, 1967346, 2350860, 2754829, 3301233, 3019764, 6702956, 3881624, 2350862, preferably 1537406, 5965080, 1967346, 2350860, 2754829, 3301233, 3019764, 6702956, 3881624, 2350862.

[0137] According to certain embodiments of the first and/or second aspect of the invention, the antibiotic drug is ETP and a mutation in at least one of the following nucleotide positions is detected with regard to reference genome NC_023149: 1979239, 5987559, 2754829, 3301233, 3299685, 1099519, prefe2754829, 3301233, 3299685, 1099519rably.

[0138] According to certain embodiments of the first and/or second aspect of the invention, the antibiotic drug is CFT, IMP, MER, CAX, AZT, and/or CAZ and a mutation in at least one of the following nucleotide positions is detected with regard to reference genome NC_023149: 1979239, 5987559.

[0139] According to certain embodiments of the first and/or second aspect of the invention, the resistance of a bacterial microorganism belonging to the species Pseudomonas against 1, 2, 3, 4, 5, 6, 7, 8, 9, 10, 11, 12, 13, 14, 15 or 16, 17, 18, 19, 20 or 21 antibiotic drugs is determined.

[0140] According to certain embodiments of the first and/or second aspect of the invention, a detected mutation is a mutation leading to an altered amino acid sequence in a polypeptide derived from a respective gene in which the detected mutation is located. According to this aspect, the detected mutation thus leads to a truncated version of the polypeptide (wherein a new stop codon is created by the mutation) or a mutated version of the polypeptide having an amino acid exchange at the respective position.

[0141] According to certain embodiments of the first and/or second aspect of the invention, determining the nucleic acid sequence information or the presence of a mutation comprises determining a partial sequence or an entire sequence of the at least two genes.

[0142] According to certain embodiments of the first and/or second aspect of the invention, determining the nucleic acid sequence information or the presence of a mutation comprises determining a partial or entire sequence of the genome of the Pseudomonas species, wherein said partial or entire sequence of the genome comprises at least a partial sequence of said at least two genes.

[0143] According to certain embodiments of the first and/or second aspect of the invention, determining the nucleic acid sequence information or the presence of a mutation comprises using a next generation sequencing or high throughput sequencing method. According to preferred embodiments of the first and/or second aspect of the invention, a partial or entire genome sequence of the bacterial organism of Pseudomonas species is determined by using a next generation sequencing or high throughput sequencing method.

[0144] In a further, third aspect, the present invention relates to a method of determining an antimicrobial drug, e.g. antibiotic, resistance profile for bacterial microorganisms of Pseudomonas species, comprising:

[0145] obtaining or providing a first data set of gene sequences of a plurality of clinical isolates of Pseudomonas species;

[0146] providing a second data set of antimicrobial drug, e.g. antibiotic, resistance of the plurality of clinical isolates of Pseudomonas species;

[0147] aligning the gene sequences of the first data set to at least one, preferably one, reference genome of Pseudomonas, and/or assembling the gene sequence of the first data set, at least in part;

[0148] analyzing the gene sequences of the first data set for genetic variants to obtain a third data set of genetic variants; correlating the third data set with the second data set and statistically analyzing the correlation; and

[0149] determining the genetic sites in the genome of Pseudomonas associated with antimicrobial drug, e.g. antibiotic, resistance.

[0150] The different steps can be carried out as described with regard to the method of the first aspect of the present invention.

[0151] When referring to the second data set, wherein the second data set e.g. comprises, respectively is, a set of antimicrobial drug, e.g. antibiotic, resistances of a plurality of clinical isolates, this can, within the scope of the invention, also refer to a self-learning data base that, whenever a new sample is analyzed, can take this sample into the second data set and thus expand its data base. The second data set thus does not have to be static and can be expanded, either by external input or by incorporating new data due to self-learning. This is, however, not restricted to the third aspect of the invention, but applies to other aspects of the invention that refer to a second data set, which does not necessarily have to refer to antimicrobial drug resistance. The same applies, where applicable, to the first data set, e.g. in the third aspect.

[0152] According to certain embodiments, statistical analysis in the present methods is carried out using Fisher's test with p<10⁻⁶, preferably p<10⁻⁹, particularly p<10⁻¹⁰.

[0153] The method of the third aspect of the present invention, as well as related methods, e.g. according to the 7^{th} and 10^{th} aspect, can, according to certain embodiments, comprise correlating different genetic sites to each other, e.g. in at least two, three, four, five, six, seven, eight, nine or ten genes. This way even higher statistical significance can be achieved.

[0154] According to certain embodiments of the method of the third aspect and related methods—as above, the second data set is provided by culturing the clinical isolates of Pseudomonas species on agar plates provided with antimicrobial drugs, e.g. antibiotics, at different concentrations and the second data is obtained by taking the minimal concentration of the plates that inhibits growth of the respective Pseudomonas species.

[0155] According to certain embodiments of the method of the third aspect and related methods, the antibiotic is at least one selected from the group of β-lactams, β-lactam inhibitors, quinolines and derivatives thereof, aminoglycosides, tetracyclines, and folate synthesis inhibitors, preferably Amoxicillin/K Clavulanate, Ampicillin, Aztreonam, Cefazolin, Cefepime, Cefotaxime, Ceftazidime, Ceftriaxone, Cefuroxime, Cephalothin, Ciprofloxacin, Ertapenem, Gentamicin, Imipenem, Levofloxacin, Meropenem, Piperacillin/Tazobactam, Ampicillin/Sulbactam, Tetracycline, Tobramycin, and Trimethoprim/Sulfamethoxazole.

[0156] According to certain embodiments of the method of the third aspect and related methods, the gene sequences in the third data set are comprised in at least one gene from the group of genes consisting of SCV20265_1892, SCV20265_5625, SCV20265_1467, SCV20265_5607, SCV20265_3294, SCV20265_1879, SCV20265_5242, SCV20265_2224, SCV20265_0530, SCV20265_3289, SCV20265_1858, SCV20265_2193, SCV20265_6274, SCV20265_2958, SCV20265_3248, SCV20265_1132, SCV20265_1451, SCV20265_6120, SCV20265_4839, SCV20265_2195, SCV20265_0968, SCV20265_2464, SCV20265_2518, SCV20265_2654, SCV20265_3101, SCV20265_3909, SCV20265_2610, SCV20265_1805, SCV20265_4445, SCV20265_2883, SCV20265_2916, SCV20265_1721, SCV20265_3099, SCV20265_1735, SCV20265_6289, SCV20265_2974, SCV20265_2404, SCV20265_6135, SCV20265_3626, SCV20265_1050, SCV20265_0188, SCV20265_5329, SCV20265_2792, SCV20265_1617, SCV20265_2236, SCV20265_0491, SCV20265_2422, SCV20265_5463, SCV20265_5597, and SCV20265_0241, preferably SCV20265_1467, SCV20265_5607, SCV20265_3294, SCV20265_1879, SCV20265_5242, SCV20265_2224, SCV20265_0530, SCV20265_3289, SCV20265_1858, SCV20265_2193, SCV20265_6274, SCV20265_2958, SCV20265_3248, SCV20265_1132, SCV20265_1451, SCV20265_6120, SCV20265_4839, SCV20265_2195, SCV20265_0968, SCV20265_2464, SCV20265_2518, SCV20265_2654, SCV20265_3101, SCV20265_3909, SCV20265_2610, SCV20265_1805, SCV20265_4445, SCV20265_2883, SCV20265_2916, SCV20265_1721, SCV20265_3099, SCV20265_1735, SCV20265_6289, SCV20265_2974, SCV20265_2404, SCV20265_6135, SCV20265_3626, SCV20265_1050, SCV20265_0188, SCV20265_5329, SCV20265_2792, SCV20265_1617, SCV20265_2236, SCV20265_0491, SCV20265_2422, SCV20265_5463, SCV20265_5597, and SCV20265_0241, or from the genes listed in Table 5, preferably from the genes listed in Table 5a.

[0157] According to certain embodiments of the method of the third aspect and related methods, the genetic variant has a point mutation, an insertion and or deletion of up to four bases, and/or a frameshift mutation, particularly a non-synonymous coding in YP_008980900.1 and/or YP_008984625.1.

[0158] A fourth aspect of the present invention relates to a method of determining an antimicrobial drug, e.g. antibiotic, resistance profile for a bacterial microorganism belonging to the species Pseudomonas comprising the steps of

[0159] a) obtaining or providing a sample containing or suspected of containing the bacterial microorganism;

[0160] b) determining the presence of a mutation in at least one gene of the bacterial microorganism as determined by the method of the third aspect of the invention;

[0161] wherein the presence of a mutation is indicative of a resistance to an antimicrobial drug, e.g. antibiotic, drug.

[0162] Steps a) and b) can herein be carried out as described with regard to the first aspect, as well as for the following aspects of the invention.

[0163] With this method, any mutations in the genome of Pseudomonas species correlated with antimicrobial drug, e.g. antibiotic, resistance can be determined and a thorough antimicrobial drug, e.g. antibiotic, resistance profile can be established. A simple read out concept for a diagnostic test as described in this aspect is shown schematically in FIG. 1.

[0164] According to FIG. 1, a sample 1, e.g. blood from a patient, is used for molecular testing 2, e.g. using next generation sequencing (NGS), and then a molecular fingerprint 3 is taken, e.g. in case of NGS a sequence of selected genomic/plasmid regions or the whole genome is assembled. This is then compared to a reference library 4, i.e. selected sequences or the whole sequence are/is compared to one or more reference sequences, and mutations (SNPs, sequence-gene additions/deletions, etc.) are correlated with susceptibility/reference profile of reference strains in the reference library. The reference library 4 herein contains many genomes and is different from a reference genome. Then the result 5 is reported comprising ID (pathogen identification), i.e. a list of all (pathogenic) species identified in the sample, and AST (antimicrobial susceptibility testing), i.e. a list including a susceptibility/resistance profile for all species listed

[0165] A fifth aspect of the present invention relates to a diagnostic method of determining an infection of a patient with Pseudomonas species potentially resistant to antimicrobial drug treatment, which also can be described as method of determining an antimicrobial drug, e.g. antibiotic, resistant Pseudomonas infection in a patient, comprising the steps of:

[0166] a) obtaining or providing a sample containing or suspected of containing a bacterial microorganism belonging to the species Pseudomonas from the patient;

[0167] b) determining the presence of at least one mutation in at least one gene of the bacterial microorganism belonging to the species Pseudomonas as determined by the method of the third aspect of the present invention, wherein the presence of said at least one mutation is indicative of an antimicrobial drug, e.g. antibiotic, resistant Pseudomonas infection in said patient.

[0168] Again, steps a) and b) can herein be carried out as described with regard to the first aspect of the present invention.

[0169] According to this aspect, a Pseudomonas infection in a patient can be determined using sequencing methods as well as a resistance to antimicrobial drugs, e.g. antibiotics, of the Pseudomonas species be determined in a short amount of time compared to the conventional methods.

[0170] In a sixth aspect the present invention relates to a method of selecting a treatment of a patient suffering from an infection with a potentially resistant Pseudomonas strain, e.g. an antimicrobial drug, e.g. antibiotic, resistant Pseudomonas infection, comprising the steps of:

[0171] a) obtaining or providing a sample containing or suspected of containing a bacterial microorganism belonging to the species Pseudomonas from the patient;

[0172] b) determining the presence of at least one mutation in at least one gene of the bacterial microorganism belonging to the species Pseudomonas as determined by the method of the third aspect of the invention, wherein the presence of said at least one mutation is indicative of a resistance to one or more antimicrobial, e.g. antibiotic, drugs;

[0173] c) identifying said at least one or more antimicrobial, e.g. antibiotic, drugs; and

[0174] d) selecting one or more antimicrobial, e.g. antibiotic, drugs different from the ones identified in step c) and being suitable for the treatment of a Pseudomonas infection.

[0175] This method can be carried out similarly to the second aspect of the invention and enables a fast was to select a suitable treatment with antibiotics for any infection with an unknown Pseudomonas species.

[0176] A seventh aspect of the present invention relates to a method of acquiring, respectively determining, an antimicrobial drug, e.g. antibiotic, resistance profile for a bacterial microorganism of Pseudomonas species, comprising:

[0177] obtaining or providing a first data set of gene sequences of a clinical isolate of Pseudomonas species;

[0178] providing a second data set of antimicrobial drug, e.g. antibiotic, resistance of a plurality of clinical isolates of Pseudomonas species;

[0179] aligning the gene sequences of the first data set to at least one, preferably one, reference genome of Pseudomonas, and/or assembling the gene sequence of the first data set, at least in part;

[0180] analyzing the gene sequences of the first data set for genetic variants to obtain a third data set of genetic variants of the first data set;

[0181] correlating the third data set with the second data set and statistically analyzing the correlation; and

[0182] determining the genetic sites in the genome of Pseudomonas of the first data set associated with antimicrobial drug, e.g. antibiotic, resistance.

[0183] With this method, antimicrobial drug, e.g. antibiotic, resistances in an unknown isolate of Pseudomonas can be determined.

[0184] According to certain embodiments, the reference genome of Pseudomonas is NC_023149 as annotated at the NCBI. According to certain embodiments, statistical analysis in the present methods is carried out using Fisher's test with p<10⁻⁶, preferably p<10⁻⁹, particularly p<10⁻¹⁰. Also, according to certain embodiments, the method further comprises correlating different genetic sites to each other, e.g. in at least two, three, four, five, six, seven, eight, nine or ten genes.

[0185] An eighth aspect of the present invention relates to a computer program product comprising computer executable instructions which, when executed, perform a method according to the third, fourth, fifth, sixth or seventh aspect of the present invention.

[0186] In certain embodiments the computer program product is one on which program commands or program codes of a computer program for executing said method are stored. According to certain embodiments the computer program product is a storage medium. The same applies to the computer program products of the aspects mentioned afterwards, i.e. the eleventh aspect of the present invention. As noted above, the computer program products of the present invention can be self-learning, e.g. with respect to the first and second data sets.

[0187] In order to obtain the best possible information from the highly complex genetic data and develop an optimum model for diagnostic and therapeutical uses as well as the methods of the present invention—which can be applied stably in clinical routine—a thorough in silico analysis can be necessary. The proposed principle is based on a combination of different approaches, e.g. alignment with at least one, preferably more reference genomes and/or assembly of the genome and correlation of mutations found in every sample, e.g. from each patient, with all references and drugs, e.g. antibiotics, and search for mutations which occur in several drug and several strains.

[0188] Using the above steps a list of mutations as well of genes is generated. These can be stored in databases and statistical models can be derived from the databases. The statistical models can be based on at least one or more mutations at least one or more genes. Statistical models that can be trained can be combined from mutations and genes. Examples of algorithms that can produce such models are association Rules, Support Vector Machines, Decision Trees, Decision Forests, Discriminant-Analysis, Cluster-Methods, and many more.

[0189] The goal of the training is to allow a reproducible, standardized application during routine procedures.

[0190] For this, for example, a genome or parts of the genome of a microorganism can be sequenced from a patient to be diagnosed. Afterwards, core characteristics can be derived from the sequence data which can be used to predict resistance. These are the points in the database used for the final model, i.e. at least one mutation or at least one gene, but also combinations of mutations, etc.

[0191] The corresponding characteristics can be used as input for the statistical model and thus enable a prognosis for new patients. Not only the information regarding all resistances of all microorganisms, e.g. of Pseudomonas species, against all drugs, e.g. antibiotics, can be integrated in a computer decision support tool, but also corresponding directives (e.g. EUCAST) so that only treatment proposals are made that are in line with the directives.

[0192] A ninth aspect of the present invention relates to the use of the computer program product according to the eighth aspect for acquiring an antimicrobial drug, e.g. antibiotic, resistance profile for bacterial microorganisms of Pseudomonas species or in a method of the third aspect of the invention.

[0193] In a tenth aspect a method of selecting a treatment of a patient having an infection with a bacterial microorganism of Pseudomonas species, comprising:

[0194] obtaining or providing a first data set comprising a gene sequence of at least one clinical isolate of the microorganism from the patient;

[0195] providing a second data set of antimicrobial drug, e.g. antibiotic, resistance of a plurality of clinical isolates of the microorganism;

[0196] aligning the gene sequences of the first data set to at least one, preferably one, reference genome of the microorganism, and/or assembling the gene sequence of the first data set, at least in part;

[0197] analyzing the gene sequences of the first data set for genetis variants to obtain a third data set of genetic variants of the first data set;

[0198] correlating the third data set with the second data set of antimicrobial drug, e.g. antibiotic, resistance of a plurality of clinical isolates of the microorganism and statistically analyzing the correlation;

[0199] determining the genetic sites in the genome of the clinical isolate of the microorganism of the first data set associated with antimicrobial drug, e.g. antibiotic, resistance; and selecting a treatment of the patient with one or more antimicrobial, e.g. antibiotic, drugs different from the ones identified in the determination of the genetic sites associated with antimicrobial drug, e.g. antibiotic, resistance is disclosed.

[0200] Again, the steps can be carried out as similar steps before. In this method, as well as similar ones, no aligning is necessary, as the unknown sample can be directly correlated, after the genome or genome sequences are produced, with the second data set and thus mutations and antimicrobial drug, e.g. antibiotic, resistances can be determined. The first data set can be assembled, for example, using known techniques.

[0201] According to certain embodiments, statistical analysis in the present method is carried out using Fisher's test with p<10⁻⁶, preferably p<10⁻⁹, particularly p<10⁻¹⁰. Also, according to certain embodiments, the method further comprises correlating different genetic sites to each other.

[0202] An eleventh aspect of the present invention is directed to a computer program product comprising computer executable instructions which, when executed, perform a method according to the tenth aspect.

[0203] According to a twelfth aspect of the present invention, a diagnostic method of determining an infection of a patient with Pseudomonas species potentially resistant to antimicrobial drug treatment, which can also be described as a method of determining an antimicrobial drug, e.g. antibiotic, resistant Pseudomonas infection of a patient is disclosed, comprising the steps of:

[0204] a) obtaining or providing a sample containing or suspected of containing at least one Pseudomonas species from the patient;

[0205] b) determining the presence of at least one mutation in at least two genes from the group of genes listed in Table 5, preferably from the group of genes listed in Table 5a, wherein the presence of said at least two mutations is indicative of an antimicrobial drug, e.g. antibiotic, resistant Pseudomonas infection in said patient.

[0206] A thirteenth aspect of the invention discloses a method of selecting a treatment of a patient suffering from an antimicrobial drug, e.g. antibiotic, resistant Pseudomonas infection, comprising the steps of:

[0207] a) obtaining or providing a sample containing or suspected of containing at least one Pseudomonas species from the patient;

[0208] b) determining the presence of at least one mutation in at least two genes from the group of genes listed in Table 5, preferably from the group of genes listed in Table 5a, wherein the presence of said at least two mutations is indicative of a resistance to one or more antimicrobial, e.g. antibiotic, drugs;

[0209] c) identifying said at least one or more antimicrobial, e.g. antibiotic, drugs; and

[0210] d) selecting one or more antimicrobial, e.g. antibiotic, drugs different from the ones identified in step c) and being suitable for the treatment of a Pseudomonas infection.

[0211] Again, the steps can be carried out as in similar methods before, e.g. as in the first and second aspect of the invention. In the twelfth and thirteenth aspect of the invention, as well as also in the eighteenth aspect of the present invention, all classes of antibiotics considered in the present method are covered.

[0212] Herein, the genes in Table 5 are the following: SCV20265_1892, SCV20265_5625, SCV20265_1467, SCV20265_5607, SCV20265_3294, SCV20265_1879, SCV20265_5242, SCV20265_2224, SCV20265_0530, SCV20265_3289, SCV20265_1858, SCV20265_2193, SCV20265_6274, SCV20265_2958, SCV20265_3248, SCV20265_1132, SCV20265_1451, SCV20265_6120, SCV20265_4839, SCV20265_2195, SCV20265_0968, SCV20265_2464, SCV20265_2518, SCV20265_2654, SCV20265_3101, SCV20265_3909, SCV20265_2610, SCV20265_1805, SCV20265_4445, SCV20265_2883, SCV20265_2916, SCV20265_1721, SCV20265_3099, SCV20265_1735, SCV20265_6289, SCV20265_2974, SCV20265_2404, SCV20265_6135, SCV20265_3626, SCV20265_1050, SCV20265_0188, SCV20265_5329, SCV20265_2792, SCV20265_1617, SCV20265_2236, SCV20265_0491, SCV20265_2422, SCV20265_5463, SCV20265_5597, SCV20265_0241, SCV20265_4334, SCV20265_0891, SCV20265_1756, SCV20265_1113, SCV20265_1895, SCV20265_4827, SCV20265_4159, SCV20265_4562, SCV20265_3569, SCV20265_0041, SCV20265_0017, SCV20265_0008, SCV20265_0032, SCV20265_0033, SCV20265_0007, SCV20265_0028, SCV20265_0014, SCV20265_0016.

[0213] Herein, the genes in Table 5a are the following: SCV20265_1467, SCV20265_5607, SCV20265_3294, SCV20265_1879, SCV20265_5242, SCV20265_2224, SCV20265_0530, SCV20265_3289, SCV20265_1858, SCV20265_2193, SCV20265_6274, SCV20265_2958, SCV20265_3248, SCV20265_1132, SCV20265_1451, SCV20265_6120, SCV20265_4839, SCV20265_2195, SCV20265_0968, SCV20265_2464, SCV20265_2518, SCV20265_2654, SCV20265_3101, SCV20265_3909, SCV20265_2610, SCV20265_1805, SCV20265_4445, SCV20265_2883, SCV20265_2916, SCV20265_1721, SCV20265_3099, SCV20265_1735, SCV20265_6289, SCV20265_2974, SCV20265_2404, SCV20265_6135, SCV20265_3626, SCV20265_1050, SCV20265_0188, SCV20265_5329, SCV20265_2792, SCV20265_1617, SCV20265_2236, SCV20265_0491, SCV20265_2422, SCV20265_5463, SCV20265_5597, SCV20265_0241, SCV20265_4334, SCV20265_0891, SCV20265_1756, SCV20265_1113, SCV20265_1895, SCV20265_4827, SCV20265_4159, SCV20265_4562, SCV20265_3569, SCV20265_0041, SCV20265_0017, SCV20265_0008, SCV20265_0032, SCV20265_0033, SCV20265_0007, SCV20265_0028, SCV20265_0014, SCV20265_0016.

[0214] According to certain embodiments, mutations in at least two, three, four, five, six, seven, eight, nine or ten genes are determined in any of the methods of the present invention, e.g. in at least two genes or in at least three genes. Instead of testing only single genes or mutants, a combination of several variant positions can improve the prediction accuracy and further reduce false positive findings that are influenced by other factors. Therefore, it is in particular preferred to determine the presence of a mutation in 2, 3, 4, 5, 6, 7, 8 or 9 (or more) genes selected from Table 5, preferably Table 5a.

[0215] Further, according to certain embodiments, the reference genome of Pseudomonas is again NC_023149 as annotated at the NCBI. According to certain embodiments, statistical analysis in the present methods is carried out using Fisher's test with p<10⁻⁶, preferably p<10⁻⁹, particularly p<10⁻¹⁰. Also, according to certain embodiments, the method further comprises correlating different genetic sites to each other. Also the other aspects of the embodiments of the first and second aspect of the invention apply.

TABLE 5
List of genes

| | | | |
|---|---|---|---|
| SCV20265_1892 | SCV20265_5625 | SCV20265_1467 | SCV20265_5607 |
| SCV20265_3294 | SCV20265_1879 | SCV20265_5242 | SCV20265_2224 |
| SCV20265_0530 | SCV20265_3289 | SCV20265_1858 | SCV20265_2193 |
| SCV20265_6274 | SCV20265_2958 | SCV20265_3248 | SCV20265_1132 |
| SCV20265_1451 | SCV20265_6120 | SCV20265_4839 | SCV20265_2195 |
| SCV20265_0968 | SCV20265_2464 | SCV20265_2518 | SCV20265_2654 |
| SCV20265_3101 | SCV20265_3909 | SCV20265_2610 | SCV20265_1805 |
| SCV20265_4445 | SCV20265_2883 | SCV20265_2916 | SCV20265_1721 |
| SCV20265_3099 | SCV20265_1735 | SCV20265_6289 | SCV20265_2974 |
| SCV20265_2404 | SCV20265_6135 | SCV20265_3626 | SCV20265_1050 |
| SCV20265_0188 | SCV20265_5329 | SCV20265_2792 | SCV20265_1617 |
| SCV20265_2236 | SCV20265_0491 | SCV20265_2422 | SCV20265_5463 |
| SCV20265_5597 | SCV20265_0241 | SCV20265_4334 | SCV20265_0891 |
| SCV20265_1756 | SCV20265_1113 | SCV20265_1895 | SCV20265_4827 |
| SCV20265_4159 | SCV20265_4562 | SCV20265_3569 | SCV20265_0041 |
| SCV20265_0017 | SCV20265_0008 | SCV20265_0032 | SCV20265_0033 |
| SCV20265_0007 | SCV20265_0028 | SCV20265_0014 | SCV20265_0016 |

TABLE 5a
List of genes

| | | | |
|---|---|---|---|
| SCV20265_0014 | SCV20265_0016 | SCV20265_1467 | SCV20265_5607 |
| SCV20265_3294 | SCV20265_1879 | SCV20265_5242 | SCV20265_2224 |
| SCV20265_0530 | SCV20265_3289 | SCV20265_1858 | SCV20265_2193 |
| SCV20265_6274 | SCV20265_2958 | SCV20265_3248 | SCV20265_1132 |
| SCV20265_1451 | SCV20265_6120 | SCV20265_4839 | SCV20265_2195 |
| SCV20265_0968 | SCV20265_2464 | SCV20265_2518 | SCV20265_2654 |
| SCV20265_3101 | SCV20265_3909 | SCV20265_2610 | SCV20265_1805 |
| SCV20265_4445 | SCV20265_2883 | SCV20265_2916 | SCV20265_1721 |
| SCV20265_3099 | SCV20265_1735 | SCV20265_6289 | SCV20265_2974 |
| SCV20265_2404 | SCV20265_6135 | SCV20265_3626 | SCV20265_1050 |
| SCV20265_0188 | SCV20265_5329 | SCV20265_2792 | SCV20265_1617 |
| SCV20265_2236 | SCV20265_0491 | SCV20265_2422 | SCV20265_5463 |
| SCV20265_5597 | SCV20265_0241 | SCV20265_4334 | SCV20265_0891 |
| SCV20265_1756 | SCV20265_1113 | SCV20265_1895 | SCV20265_4827 |
| SCV20265_4159 | SCV20265_4562 | SCV20265_3569 | SCV20265_0041 |
| SCV20265_0017 | SCV20265_0008 | SCV20265_0032 | SCV20265_0033 |
| SCV20265_0007 | SCV20265_0028 | | |

[0216] According to certain embodiments of the method of the twelfth and/or thirteenth aspect of the present invention, as well as also of the eighteenth aspect of the present invention, the antimicrobial drug is an antibiotic. According to certain embodiments, the antibiotic is a lactam antibiotic and a mutation in at least one of the genes listed in Table 6, preferably Table 6a, is detected, or a mutation in at least one of the positions (denoted POS in the tables) listed in Table 6, preferably Table 6a.

TABLE 6
List for lactam antibiotics

| | | | p-value | genbank protein |
|---|---|---|---|---|
| gene name | POS | antibiotic | (FDR) | accession number |
| SCV20265_1892 | 1979239 | T/S; CP; CFT; LVX; GM; IMP; ETP; | 1.5814E−141 | YP_008980900.1 |
| | | MER; CAX; AZT; P/T; CPE; CAZ; TO | | |
| SCV20265_5625 | 5987559 | T/S; CP; CFT; LVX; GM; IMP; ETP; | 1.2153E−121 | YP_008984625.1 |
| | | MER; CAX; AZT; P/T; CPE; CAZ; TO | | |
| SCV20265_4334 | 4604211 | T/S; CP; LVX; GM; ETP; MER; AZT; | 2.21898E−31 | YP_008983338.1 |
| | | P/T; CPE; TO | | |
| SCV20265_0891 | 938801 | T/S; CP; GM; IMP; ETP; MER; P/T; | 2.24131E−27 | YP_008979899.1 |
| | | TO; LVX | | |
| SCV20265_1756 | 1846678 | T/S; CP; GM; IMP; ETP; MER; P/T; | 2.14003E−18 | YP_008980764.1 |
| | | TO; LVX | | |
| SCV20265_1113 | 1169401 | T/S; CP; GM; IMP; ETP; MER; TO; | 2.43872E−22 | YP_008980121.1 |
| | | LVX | | |
| SCV20265_1895 | 1984529 | T/S; CP; LVX; GM; IMP; P/T; CPE; | 1.12601E−29 | YP_008980903.1 |
| | | TO | | |
| SCV20265_4827 | 5100757 | T/S; CP; GM; IMP; MER; P/T; TO; | 2.58406E−24 | YP_008983827.1 |
| | | LVX | | |
| SCV20265_1467 | 1537406 | T/S; CP; LVX; GM; P/T; TO; CPE | 1.53793E−41 | YP_008980475.1 |
| SCV20265_2654 | 2754829 | T/S; CP; LVX; GM; ETP; TO; CPE | 1.05377E−35 | YP_008981662.1 |
| SCV20265_6289 | 6702956 | T/S; CP; LVX; GM; P/T; TO; CPE | 1.19545E−34 | YP_008985285.1 |
| SCV20265_3626 | 3881624 | T/S; CP; LVX; GM; P/T; TO; CPE | 2.22675E−34 | YP_008982632.1 |
| SCV20265_1050 | 1099519 | T/S; CP; LVX; GM; ETP; TO; CPE | 2.28786E−34 | YP_008980058.1 |
| SCV20265_4159 | 4419978 | T/S; CP; LVX; GM; P/T; TO; CPE | 1.13138E−33 | YP_008983163.1 |
| SCV20265_4562 | 4832599 | MER; ETP | 2.71389E−33 | YP_008983564.1 |

FDR: determined according to FDR (Benjamini Hochberg) method (Benjamini Hochberg, 1995)

TABLE 6a
List for lactam antibiotics

| | | | p-value | genbank protein |
|---|---|---|---|---|
| gene name | POS | antibiotic | (FDR) | accession number |
| SCV20265_4334 | 4604211 | T/S; CP; LVX; GM; ETP; MER; AZT; | 2.21898E−31 | YP_008983338.1 |
| | | P/T; CPE; TO | | |
| SCV20265_0891 | 938801 | T/S; CP; GM; IMP; ETP; MER; P/T; | 2.24131E−27 | YP_008979899.1 |
| | | TO; LVX | | |
| SCV20265_1756 | 1846678 | T/S; CP; GM; IMP; ETP; MER; P/T; | 2.14003E−18 | YP_008980764.1 |
| | | TO; LVX | | |
| SCV20265_1113 | 1169401 | T/S; CP; GM; IMP; ETP; MER; TO; | 2.43872E−22 | YP_008980121.1 |
| | | LVX | | |
| SCV20265_1895 | 1984529 | T/S; CP; LVX; GM; IMP; P/T; CPE; | 1.12601E−29 | YP_008980903.1 |
| | | TO | | |
| SCV20265_4827 | 5100757 | T/S; CP; GM; IMP; MER; P/T; TO; | 2.58406E−24 | YP_008983827.1 |
| | | LVX | | |
| SCV20265_1467 | 1537406 | T/S; CP; LVX; GM; P/T; TO; CPE | 1.53793E−41 | YP_008980475.1 |
| SCV20265_2654 | 2754829 | T/S; CP; LVX; GM; ETP; TO; CPE | 1.05377E−35 | YP_008981662.1 |
| SCV20265_6289 | 6702956 | T/S; CP; LVX; GM; P/T; TO; CPE | 1.19545E−34 | YP_008985285.1 |
| SCV20265_3626 | 3881624 | T/S; CP; LVX; GM; P/T; TO; CPE | 2.22675E−34 | YP_008982632.1 |
| SCV20265_1050 | 1099519 | T/S; CP; LVX; GM; ETP; TO; CPE | 2.28786E−34 | YP_008980058.1 |
| SCV20265_4159 | 4419978 | T/S; CP; LVX; GM; P/T; TO; CPE | 1.13138E−33 | YP_008983163.1 |
| SCV20265_4562 | 4832599 | MER; ETP | 2.71389E−33 | YP_008983564.1 |

FDR: determined according to FDR (Benjamini Hochberg) method (Benjamini Hochberg, 1995)

[0217] According to certain embodiments of the method of the twelfth and/or thirteenth aspect of the present invention, as well as also of the eighteenth aspect of the present invention, the antibiotic is IMP and a mutation in at least one of the genes of SCV20265_1892, SCV20265_5625, SCV20265_0891, SCV20265_1756, SCV20265_1113, SCV20265_1895, SCV20265_4827, preferably SCV20265_0891, SCV20265_1756, SCV20265_1113, SCV20265_1895, SCV20265_4827, is detected, or a mutation in at least one of the positions of 1979239, 5987559, 938801, 1846678, 1169401, 1984529, 5100757, preferably 938801, 1846678, 1169401, 1984529, 5100757.

[0218] According to certain embodiments of the method of the twelfth and/or thirteenth aspect of the present invention, as well as also of the eighteenth aspect of the present invention, the antibiotic is MER and a mutation in at least one of the genes of SCV20265_1892, SCV20265_5625, SCV20265_4334, SCV20265_0891, SCV20265_1756, SCV20265_1113, SCV20265_4827, SCV20265_4562, preferably SCV20265_4334, SCV20265_0891, SCV20265_1756, SCV20265_1113, SCV20265_4827, SCV20265_4562, is detected, or a mutation in at least one of the positions of 1979239, 5987559, 4604211, 938801, 1846678, 1169401, 5100757, 4832599, preferably 4604211, 938801, 1846678, 1169401, 5100757, 4832599.

[0219] According to certain embodiments of the method of the twelfth and/or thirteenth aspect of the present invention, as well as also of the eighteenth aspect of the present invention, the antibiotic is ETP and a mutation in at least one of the genes of SCV20265_1892, SCV20265_5625, SCV20265_4334, SCV20265_0891, SCV20265_1756, SCV20265_1113, SCV20265_1467, SCV20265_2654, SCV20265_1050, SCV20265_4562, preferably SCV20265_4334, SCV20265_0891, SCV20265_1756, SCV20265_1113, SCV20265_1467, SCV20265_2654, SCV20265_1050, SCV20265_4562, is detected, or a mutation in at least one of the positions of 1979239, 5987559, 4604211, 938801, 1846678, 1169401, 1537406, 2754829, 1099519, 4832599, preferably 4604211, 938801, 1846678, 1169401, 1537406, 2754829, 1099519, 4832599.

[0220] According to certain embodiments of the method of the twelfth and/or thirteenth aspect of the present invention, as well as also of the eighteenth aspect of the present invention, the antibiotic is P/T and a mutation in at least one of the genes of SCV20265_1892, SCV20265_5625, SCV20265_4334, SCV20265_0891, SCV20265_1756, SCV20265_1895, SCV20265_4827, SCV20265_6289, SCV20265_3626, SCV20265_4159, preferably SCV20265_4334, SCV20265_0891, SCV20265_1756, SCV20265_1895, SCV20265_4827, SCV20265_6289, SCV20265_3626, SCV20265_4159, is detected, or a mutation in at least one of the positions of 1979239, 5987559, 4604211, 938801, 1846678, 1984529, 5100757, 6702956, 3881624, 4419978, preferably 4604211, 938801, 1846678, 1984529, 5100757, 6702956, 3881624, 4419978.

[0221] According to certain embodiments of the method of the twelfth and/or thirteenth aspect of the present invention, as well as also of the eighteenth aspect of the present invention, the antibiotic is CPE and a mutation in at least one of the genes of SCV20265_1892, SCV20265_5625, SCV20265_4334, SCV20265_1895, SCV20265_1467, SCV20265_2654, SCV20265_6289, SCV20265_3626, SCV20265_1050, SCV20265_4159, preferably SCV20265_4334, SCV20265_1895, SCV20265_1467, SCV20265_2654, SCV20265_6289, SCV20265_3626, SCV20265_1050, SCV20265_4159, is detected, or a mutation in at least one of the positions of 1979239, 5987559, 4604211, 1984529, 1537406, 2754829, 6702956, 3881624, 1099519, 4419978, preferably 4604211, 1984529, 1537406, 2754829, 6702956, 3881624, 1099519, 4419978.

[0222] According to certain embodiments of the method of the twelfth and/or thirteenth aspect of the present invention, as well as also of the eighteenth aspect of the present invention, the antibiotic is AZT and a mutation in at least one of the genes of SCV20265_1892, SCV20265_5625, SCV20265_4334, preferably SCV20265_4334, is detected, or a mutation in at least one of the positions of 1979239, 5987559, 4604211, preferably 4604211.

[0223] According to certain embodiments of the method of the twelfth and/or thirteenth aspect of the present invention, as well as also of the eighteenth aspect of the present invention, the antibiotic is at least one of CFT, CAX and CAZ and a mutation in at least one of the genes of SCV20265_1892, SCV20265_5625 is detected, or a mutation in at least one of the positions of 1979239, 5987559.

[0224] According to certain embodiments of the method of the twelfth and/or thirteenth aspect of the present invention, as well as also of the eighteenth aspect of the present invention, the antibiotic is a quinolone antibiotic and a mutation in at least one of the genes listed in Table 7, preferably Table 7a, is detected, or a mutation in at least one of the positions (denoted POS in the tables) listed in Table 7, preferably in Table 7a.

TABLE 7
List for quinolone antibiotics

| | | | p-value | genbank protein |
|---|---|---|---|---|
| gene name | POS | antibiotic | (FDR) | accession number |
| SCV20265_1892 | 1979239 | T/S; CP; CFT; LVX; GM; IMP; | 1.5814E−141 | YP_008980900.1 |
| | | ETP; MER; CAX; AZT; P/T; CPE; | | |
| | | CAZ; TO | | |
| SCV20265_5625 | 5987559 | T/S; CP; CFT; LVX; GM; IMP; | 1.2153E−121 | YP_008984625.1 |
| | | ETP; MER; CAX; AZT; P/T; CPE; | | |
| | | CAZ; TO | | |
| SCV20265_1467 | 1537406 | T/S; CP; LVX; GM; P/T; TO; CPE | 1.53793E−41 | YP_008980475.1 |
| SCV20265_5607 | 5965080 | T/S; CP; GM; P/T; LVX; TO | 4.52474E−39 | YP_008984607.1 |
| SCV20265_3294 | 3513162 | T/S; LVX; CP; TO; GM | 1.34708E−37 | YP_008982302.1 |
| SCV20265_1879 | 1967346 | T/S; CP; GM; P/T; LVX; TO | 1.53005E−37 | YP_008980887.1 |
| SCV20265_5242 | 5569783 | T/S; CP; LVX; GM; TO; CPE | 2.19789E−37 | YP_008984242.1 |
| SCV20265_2224 | 2350860 | T/S; CP; GM; P/T; LVX; TO | 2.41127E−37 | YP_008981232.1 |
| SCV20265_2224 | 2350862 | T/S; CP; GM; P/T; LVX; TO | 2.41127E−37 | YP_008981232.1 |
| SCV20265_0530 | 562872 | T/S; CP; LVX; GM; TO; CPE | 3.4301E−37 | YP_008979538.1 |
| SCV20265_3289 | 3507580 | T/S; CP; LVX; GM; TO; CPE | 6.35793E−37 | YP_008982297.1 |
| SCV20265_1858 | 1947689 | T/S; CP; LVX; GM; TO; CPE | 6.77112E−37 | YP_008980866.1 |
| SCV20265_2193 | 2316386 | T/S; CP; LVX; GM; TO; CPE | 6.77112E−37 | YP_008981201.1 |
| SCV20265_6274 | 6685845 | T/S; CP; LVX; GM; TO; CPE | 7.04031E−37 | YP_008985270.1 |
| SCV20265_2958 | 3142437 | T/S; CP; LVX; GM; TO; CPE | 9.40137E−37 | YP_008981966.1 |
| SCV20265_3248 | 3468647 | T/S; CP; LVX; GM; TO; CPE | 1.00069E−36 | YP_008982256.1 |

TABLE 7a
List for quinolone antibiotics

| | | | p-value | genbank protein |
|---|---|---|---|---|
| gene name | POS | antibiotic | (FDR) | accession number |
| SCV20265_1467 | 1537406 | T/S; CP; LVX; GM; P/T; TO; CPE | 1.53793E−41 | YP_008980475.1 |
| SCV20265_5607 | 5965080 | T/S; CP; GM; P/T; LVX; TO | 4.52474E−39 | YP_008984607.1 |
| SCV20265_3294 | 3513162 | T/S; LVX; CP; TO; GM | 1.34708E−37 | YP_008982302.1 |
| SCV20265_1879 | 1967346 | T/S; CP; GM; P/T; LVX; TO | 1.53005E−37 | YP_008980887.1 |
| SCV20265_5242 | 5569783 | T/S; CP; LVX; GM; TO; CPE | 2.19789E−37 | YP_008984242.1 |
| SCV20265_2224 | 2350860 | T/S; CP; GM; P/T; LVX; TO | 2.41127E−37 | YP_008981232.1 |
| SCV20265_2224 | 2350862 | T/S; CP; GM; P/T; LVX; TO | 2.41127E−37 | YP_008981232.1 |
| SCV20265_0530 | 562872 | T/S; CP; LVX; GM; TO; CPE | 3.4301E−37 | YP_008979538.1 |
| SCV20265_3289 | 3507580 | T/S; CP; LVX; GM; TO; CPE | 6.35793E−37 | YP_008982297.1 |
| SCV20265_1858 | 1947689 | T/S; CP; LVX; GM; TO; CPE | 6.77112E−37 | YP_008980866.1 |
| SCV20265_2193 | 2316386 | T/S; CP; LVX; GM; TO; CPE | 6.77112E−37 | YP_008981201.1 |
| SCV20265_6274 | 6685845 | T/S; CP; LVX; GM; TO; CPE | 7.04031E−37 | YP_008985270.1 |
| SCV20265_2958 | 3142437 | T/S; CP; LVX; GM; TO; CPE | 9.40137E−37 | YP_008981966.1 |
| SCV20265_3248 | 3468647 | T/S; CP; LVX; GM; TO; CPE | 1.00069E−36 | YP_008982256.1 |

[0225] According to certain embodiments of the method of the twelfth and/or thirteenth aspect of the present invention, as well as also of the eighteenth aspect of the present invention, the antibiotic is at least one of CP and LVX and a mutation in at least one of the genes of SCV20265_1892, SCV20265_5625, SCV20265_1467, SCV20265_5607, SCV20265_3294, SCV20265_1879, SCV20265_5242, SCV20265_2224, SCV20265_0530, SCV20265_3289, SCV20265_1858, SCV20265_2193, SCV20265_6274, SCV20265_2958, SCV20265_3248, preferably SCV20265_1467, SCV20265_5607, SCV20265_3294, SCV20265_1879, SCV20265_5242, SCV20265_2224, SCV20265_0530, SCV20265_3289, SCV20265_1858, SCV20265_2193, SCV20265_6274, SCV20265_2958, SCV20265_3248, is detected, or a mutation in at least one of the positions of 1979239, 5987559, 1537406, 5965080, 3513162, 1967346, 5569783, 2350860, 2350862, 562872, 3507580, 1947689, 2316386, 6685845, 3142437, 3468647, preferably 1537406, 5965080, 3513162, 1967346, 5569783, 2350860, 2350862, 562872, 3507580, 1947689, 2316386, 6685845, 3142437, 3468647.

[0226] According to certain embodiments of the method of the twelfth and/or thirteenth aspect of the present invention, as well as also of the eighteenth aspect of the present invention, the antibiotic is an aminoglycoside antibiotic and a mutation in at least one of the genes listed in Table 8, preferably Table 8a, is detected, or a mutation in at least one of the positions (denoted POS in the tables) listed in Table 8, preferably Table 8a.

TABLE 8
List of aminoglycoside antibiotics

| | | | p-value | genbank protein |
|---|---|---|---|---|
| gene name | POS | antibiotic | (FDR) | accession number |
| SCV20265_1892 | 1979239 | T/S; CP; CFT; LVX; GM; IMP; | 1.5814E−141 | YP_008980900.1 |
| | | ETP/MER; CAX; AZT; P/T; CPE; | | |
| | | CAZ; TO | | |
| SCV20265_5625 | 5987559 | T/S; CP; CFT; LVX; GM; IMP; | 1.2153E−121 | YP_008984625.1 |
| | | ETP/MER; CAX; AZT; P/T; CPE; | | |
| | | CAZ; TO | | |
| SCV20265_1467 | 1537406 | T/S; CP; LVX; GM; P/T; TO; CPE | 1.53793E−41 | YP_008980475.1 |
| SCV20265_5607 | 5965080 | T/S; CP; GM; P/T; LVX; TO | 4.52474E−39 | YP_008984607.1 |
| SCV20265_3294 | 3513162 | T/S; LVX; CP; TO; GM | 1.34708E−37 | YP_008982302.1 |
| SCV20265_1879 | 1967346 | T/S; CP; GM; P/T; LVX; TO | 1.53005E−37 | YP_008980887.1 |
| SCV20265_5242 | 5569783 | T/S; CP; LVX; GM; TO; CPE | 2.19789E−37 | YP_008984242.1 |
| SCV20265_2224 | 2350860 | T/S; CP; GM; P/T; LVX; TO | 2.41127E−37 | YP_008981232.1 |
| SCV20265_2224 | 2350862 | T/S; CP; GM; P/T; LVX; TO | 2.41127E−37 | YP_008981232.1 |
| SCV20265_0530 | 562872 | T/S; CP; LVX; GM; TO; CPE | 3.4301E−37 | YP_008979538.1 |
| SCV20265_3289 | 3507580 | T/S; CP; LVX; GM; TO; CPE | 6.35793E−37 | YP_008982297.1 |
| SCV20265_1858 | 1947689 | T/S; CP; LVX; GM; TO; CPE | 6.77112E−37 | YP_008980866.1 |
| SCV20265_2193 | 2316386 | T/S; CP; LVX; GM; TO; CPE | 6.77112E−37 | YP_008981201.1 |
| SCV20265_6274 | 6685845 | T/S; CP; LVX; GM; TO; CPE | 7.04031E−37 | YP_008985270.1 |
| SCV20265_2958 | 3142437 | T/S; CP; LVX; GM; TO; CPE | 9.40137E−37 | YP_008981966.1 |
| SCV20265_3248 | 3468647 | T/S; CP; LVX; GM; TO; CPE | 1.00069E−36 | YP_008982256.1 |

TABLE 8
List of aminoglycoside antibiotics

| | | | p-value | genbank protein |
|---|---|---|---|---|
| gene name | POS | antibiotic | (FDR) | accession number |
| SCV20265_1467 | 1537406 | T/S; CP; LVX; GM; P/T; TO; CPE | 1.53793E−41 | YP_008980475.1 |
| SCV20265_5607 | 5965080 | T/S; CP; GM; P/T; LVX; TO | 4.52474E−39 | YP_008984607.1 |
| SCV20265_3294 | 3513162 | T/S; LVX; CP; TO; GM | 1.34708E−37 | YP_008982302.1 |
| SCV20265_1879 | 1967346 | T/S; CP; GM; P/T; LVX; TO | 1.53005E−37 | YP_008980887.1 |
| SCV20265_5242 | 5569783 | T/S; CP; LVX; GM; TO; CPE | 2.19789E−37 | YP_008984242.1 |
| SCV20265_2224 | 2350860 | T/S; CP; GM; P/T; LVX; TO | 2.41127E−37 | YP_008981232.1 |
| SCV20265_2224 | 2350862 | T/S; CP; GM; P/T; LVX; TO | 2.41127E−37 | YP_008981232.1 |
| SCV20265_0530 | 562872 | T/S; CP; LVX; GM; TO; CPE | 3.4301E−37 | YP_008979538.1 |
| SCV20265_3289 | 3507580 | T/S; CP; LVX; GM; TO; CPE | 6.35793E−37 | YP_008982297.1 |
| SCV20265_1858 | 1947689 | T/S; CP; LVX; GM; TO; CPE | 6.77112E−37 | YP_008980866.1 |
| SCV20265_2193 | 2316386 | T/S; CP; LVX; GM; TO; CPE | 6.77112E−37 | YP_008981201.1 |
| SCV20265_6274 | 6685845 | T/S; CP; LVX; GM; TO; CPE | 7.04031E−37 | YP_008985270.1 |
| SCV20265_2958 | 3142437 | T/S; CP; LVX; GM; TO; CPE | 9.40137E−37 | YP_008981966.1 |
| SCV20265_3248 | 3468647 | T/S; CP; LVX; GM; TO; CPE | 1.00069E−36 | YP_008982256.1 |

[0227] According to certain embodiments of the method of the twelfth and/or thirteenth aspect of the present invention, as well as also of the eighteenth aspect of the present invention, the antibiotic is at least one of GM and TO and a mutation in at least one of the genes of SCV20265_1892, SCV20265_5625, SCV20265_1467, SCV20265_5607, SCV20265_3294, SCV20265_1879, SCV20265_5242, SCV20265_2224, SCV20265_0530, SCV20265_3289, SCV20265_1858, SCV20265_2193, SCV20265_6274, SCV20265_2958, SCV20265_3248, preferably SCV20265_1467, SCV20265_5607, SCV20265_3294, SCV20265_1879, SCV20265_5242, SCV20265_2224, SCV20265_0530, SCV20265_3289, SCV20265_1858, SCV20265_2193, SCV20265_6274, SCV20265_2958, SCV20265_3248, is detected, or a mutation in at least one of the positions of 1979239, 5987559, 1537406, 5965080, 3513162, 1967346, 5569783, 2350860, 2350862, 562872, 3507580, 1947689, 2316386, 6685845, 3142437, 3468647, preferably 1537406, 5965080, 3513162, 1967346, 5569783, 2350860, 2350862, 562872, 3507580, 1947689, 2316386, 6685845, 3142437, 3468647.

[0228] According to certain embodiments of the method of the seventeenth and/or eighteenth aspect of the present invention, the antibiotic is T/S and a mutation in at least one of the genes listed in Table 9, preferably Table 9a, is detected, or a mutation in at least one of the positions (denoted POS in the tables) listed in Table 9, preferably Table 9a.

TABLE 9
List of others antibiotics ((benzene derived)/sulfonamide)

| | | | p-value | genbank protein |
|---|---|---|---|---|
| gene name | POS | antibiotic | (FDR) | accession number |
| SCV20265_1892 | 1979239 | T/S; CP; CFT; LVX; GM; IMP; | 1.5814E−141 | YP_008980900.1 |
| | | ETP/MER; CAX; AZT; P/T; CPE; | | |
| | | CAZ; TO | | |
| SCV20265_5625 | 5987559 | T/S; CP; CFT; LVX; GM; IMP; | 1.2153E−121 | YP_008984625.1 |
| | | ETP/MER; CAX; AZT; P/T; CPE; | | |
| | | CAZ; TO | | |
| SCV20265_1467 | 1537406 | T/S; CP; LVX; GM; P/T; TO; CPE | 1.53793E−41 | YP_008980475.1 |
| SCV20265_5607 | 5965080 | T/S; CP; GM; P/T; LVX; TO | 4.52474E−39 | YP_008984607.1 |
| SCV20265_3294 | 3513162 | T/S; LVX; CP; TO; GM | 1.34708E−37 | YP_008982302.1 |
| SCV20265_1879 | 1967346 | T/S; CP; GM; P/T; LVX; TO | 1.53005E−37 | YP_008980887.1 |
| SCV20265_5242 | 5569783 | T/S; CP; LVX; GM; TO; CPE | 2.19789E−37 | YP_008984242.1 |
| SCV20265_2224 | 2350860 | T/S; CP; GM; P/T; LVX; TO | 2.41127E−37 | YP_008981232.1 |
| SCV20265_2224 | 2350862 | T/S; CP; GM; P/T; LVX; TO | 2.41127E−37 | YP_008981232.1 |
| SCV20265_0530 | 562872 | T/S; CP; LVX; GM; TO; CPE | 3.4301E−37 | YP_008979538.1 |
| SCV20265_3289 | 3507580 | T/S; CP; LVX; GM; TO; CPE | 6.35793E−37 | YP_008982297.1 |
| SCV20265_1858 | 1947689 | T/S; CP; LVX; GM; TO; CPE | 6.77112E−37 | YP_008980866.1 |
| SCV20265_2193 | 2316386 | T/S; CP; LVX; GM; TO; CPE | 6.77112E−37 | YP_008981201.1 |
| SCV20265_6274 | 6685845 | T/S; CP; LVX; GM; TO; CPE | 7.04031E−37 | YP_008985270.1 |
| SCV20265_0041 | 46892 | T/S; CP; ETP; TO; GM | 6.66003E−27 | YP_008979049.1 |
| SCV20265_0017 | 19938 | T/S; CP; TO; GM | 5.91498E−19 | YP_008980900.1 |

TABLE 9a
List of others antibiotics ((benzene derived)/sulfonamide)

| | | | p-value | genbank protein |
|---|---|---|---|---|
| gene name | POS | antibiotic | (FDR) | accession number |
| SCV20265_1467 | 1537406 | T/S; CP; LVX; GM; P/T; TO; CPE | 1.53793E−41 | YP_008980475.1 |
| SCV20265_5607 | 5965080 | T/S; CP; GM; P/T; LVX; TO | 4.52474E−39 | YP_008984607.1 |
| SCV20265_3294 | 3513162 | T/S; LVX; CP; TO; GM | 1.34708E−37 | YP_008982302.1 |
| SCV20265_1879 | 1967346 | T/S; CP; GM; P/T; LVX; TO | 1.53005E−37 | YP_008980887.1 |
| SCV20265_5242 | 5569783 | T/S; CP; LVX; GM; TO; CPE | 2.19789E−37 | YP_008984242.1 |
| SCV20265_2224 | 2350860 | T/S; CP; GM; P/T; LVX; TO | 2.41127E−37 | YP_008981232.1 |
| SCV20265_2224 | 2350862 | T/S; CP; GM; P/T; LVX; TO | 2.41127E−37 | YP_008981232.1 |
| SCV20265_0530 | 562872 | T/S; CP; LVX; GM; TO; CPE | 3.4301E−37 | YP_008979538.1 |
| SCV20265_3289 | 3507580 | T/S; CP; LVX; GM; TO; CPE | 6.35793E−37 | YP_008982297.1 |
| SCV20265_1858 | 1947689 | T/S; CP; LVX; GM; TO; CPE | 6.77112E−37 | YP_008980866.1 |
| SCV20265_2193 | 2316386 | T/S; CP; LVX; GM; TO; CPE | 6.77112E−37 | YP_008981201.1 |
| SCV20265_6274 | 6685845 | T/S; CP; LVX; GM; TO; CPE | 7.04031E−37 | YP_008985270.1 |
| SCV20265_0041 | 46892 | T/S; CP; ETP; TO; GM | 6.66003E−27 | YP_008979049.1 |
| SCV20265_0017 | 19938 | T/S; CP; TO; GM | 5.91498E−19 | YP_008980900.1 |

[0229] A fourteenth aspect of the present invention is directed to a diagnostic method of determining an infection of a patient with Pseudomonas species potentially resistant to antimicrobial drug treatment, which can also be described as method of determining an antimicrobial drug, e.g. antibiotic, resistant Pseudomonas infection of a patient, comprising the steps of:

[0230] a) obtaining or providing a sample containing or suspected of containing at least one Pseudomonas species from the patient;

[0231] b) determining the presence of at least one mutation in at least one gene from the group of genes consisting of SCV20265_1892, SCV20265_5625, SCV20265_1467, SCV20265_5607, SCV20265_3294, SCV20265_1879, SCV20265_5242, SCV20265_2224, SCV20265_0530, SCV20265_3289, SCV20265_1858, SCV20265_2193, SCV20265_6274, SCV20265_2958, SCV20265_3248, SCV20265_1132, SCV20265_1451, SCV20265_6120, SCV20265_4839, SCV20265_2195, SCV20265_0968, SCV20265_2464, SCV20265_2518, SCV20265_2654, SCV20265_3101, SCV20265_3909, SCV20265_2610, SCV20265_1805, SCV20265_4445, SCV20265_2883, SCV20265_2916, SCV20265_1721, SCV20265_3099, SCV20265_1735, SCV20265_6289, SCV20265_2974, SCV20265_2404, SCV20265_6135, SCV20265_3626, SCV20265_1050, SCV20265_0188, SCV20265_5329, SCV20265_2792, SCV20265_1617, SCV20265_2236, SCV20265_0491, SCV20265_2422, SCV20265_5463, SCV20265_5597, and SCV20265_0241, preferably SCV20265_1467, SCV20265_5607, SCV20265_3294, SCV20265_1879, SCV20265_5242, SCV20265_2224, SCV20265_0530, SCV20265_3289, SCV20265_1858, SCV20265_2193, SCV20265_6274, SCV20265_2958, SCV20265_3248, SCV20265_1132, SCV20265_1451, SCV20265_6120, SCV20265_4839, SCV20265_2195, SCV20265_0968, SCV20265_2464, SCV20265_2518, SCV20265_2654, SCV20265_3101, SCV20265_3909, SCV20265_2610, SCV20265_1805, SCV20265_4445, SCV20265_2883, SCV20265_2916, SCV20265_1721, SCV20265_3099, SCV20265_1735, SCV20265_6289, SCV20265_2974, SCV20265_2404, SCV20265_6135, SCV20265_3626, SCV20265_1050, SCV20265_0188, SCV20265_5329, SCV20265_2792, SCV20265_1617, SCV20265_2236, SCV20265_0491, SCV20265_2422, SCV20265_5463, SCV20265_5597, and SCV20265_0241, wherein the presence of said at least one mutation is indicative of an antimicrobial drug, e.g. antibiotic, resistant Pseudomonas infection in said patient.

[0232] A fifteenth aspect of the present invention is directed to a method of selecting a treatment of a patient suffering from an antimicrobial drug, e.g. antibiotic, resistant Pseudomonas infection, comprising the steps of:

[0233] a) obtaining or providing a sample containing or suspected of containing at least one Pseudomonas species from the patient;

[0234] b) determining the presence of at least one mutation in at least one gene from the group of genes consisting of SCV20265_1892, SCV20265_5625, SCV20265_1467, SCV20265_5607, SCV20265_3294, SCV20265_1879, SCV20265_5242, SCV20265_2224, SCV20265_0530, SCV20265_3289, SCV20265_1858, SCV20265_2193, SCV20265_6274, SCV20265_2958, SCV20265_3248, SCV20265_1132, SCV20265_1451, SCV20265_6120, SCV20265_4839, SCV20265_2195, SCV20265_0968, SCV20265_2464, SCV20265_2518, SCV20265_2654, SCV20265_3101, SCV20265_3909, SCV20265_2610, SCV20265_1805, SCV20265_4445, SCV20265_2883, SCV20265_2916, SCV20265_1721, SCV20265_3099, SCV20265_1735, SCV20265_6289, SCV20265_2974, SCV20265_2404, SCV20265_6135, SCV20265_3626, SCV20265_1050, SCV20265_0188, SCV20265_5329, SCV20265_2792, SCV20265_1617, SCV20265_2236, SCV20265_0491, SCV20265_2422, SCV20265_5463, SCV20265_5597, and SCV20265_0241, preferably SCV20265_1467, SCV20265_5607, SCV20265_3294, SCV20265_1879, SCV20265_5242, SCV20265_2224, SCV20265_0530, SCV20265_3289, SCV20265_1858, SCV20265_2193, SCV20265_6274, SCV20265_2958, SCV20265_3248, SCV20265_1132, SCV20265_1451, SCV20265_6120, SCV20265_4839, SCV20265_2195, SCV20265_0968, SCV20265_2464, SCV20265_2518, SCV20265_2654, SCV20265_3101, SCV20265_3909, SCV20265_2610, SCV20265_1805, SCV20265_4445, SCV20265_2883, SCV20265_2916, SCV20265_1721, SCV20265_3099, SCV20265_1735, SCV20265_6289, SCV20265_2974, SCV20265_2404, SCV20265_6135, SCV20265_3626, SCV20265_1050, SCV20265_0188, SCV20265_5329, SCV20265_2792, SCV20265_1617, SCV20265_2236, SCV20265_0491, SCV20265_2422, SCV20265_5463, SCV20265_5597, and SCV20265_0241, wherein the presence of said at least one mutation is indicative of a resistance to one or more antimicrobial, e.g. antibiotic, drugs;

[0235] c) identifying said at least one or more antimicrobial, e.g. antibiotic, drugs; and

[0236] d) selecting one or more antimicrobial, e.g. antibiotic, drugs different from the ones identified in step c) and being suitable for the treatment of a Pseudomonas infection.

[0237] Again, in the fourteenth and the fifteenth aspect the steps correspond to those in the first or second aspect, although only a mutation in at least one gene is determined.

[0238] A sixteenth aspect of the present invention is directed to a method of treating a patient suffering from an antimicrobial drug, e.g. antibiotic, resistant Pseudomonas infection, comprising the steps of:

[0239] a) obtaining or providing a sample containing or suspected of containing at least one Pseudomonas species from the patient;

[0240] b) determining the presence of at least one mutation in at least one gene from the group of genes consisting of SCV20265_1892, SCV20265_5625, SCV20265_1467, SCV20265_5607, SCV20265_3294, SCV20265_1879, SCV20265_5242, SCV20265_2224, SCV20265_0530, SCV20265_3289, SCV20265_1858, SCV20265_2193, SCV20265_6274, SCV20265_2958, SCV20265_3248, SCV20265_1132, SCV20265_1451, SCV20265_6120, SCV20265_4839, SCV20265_2195, SCV20265_0968, SCV20265_2464, SCV20265_2518, SCV20265_2654, SCV20265_3101, SCV20265_3909, SCV20265_2610, SCV20265_1805, SCV20265_4445, SCV20265_2883, SCV20265_2916, SCV20265_1721, SCV20265_3099, SCV20265_1735, SCV20265_6289, SCV20265_2974, SCV20265_2404, SCV20265_6135, SCV20265_3626, SCV20265_1050, SCV20265_0188, SCV20265_5329, SCV20265_2792, SCV20265_1617, SCV20265_2236, SCV20265_0491, SCV20265_2422, SCV20265_5463, SCV20265_5597, and SCV20265_0241, preferably SCV20265_1467, SCV20265_5607, SCV20265_3294, SCV20265_1879, SCV20265_5242, SCV20265_2224, SCV20265_0530, SCV20265_3289, SCV20265_1858, SCV20265_2193, SCV20265_6274, SCV20265_2958, SCV20265_3248, SCV20265_1132, SCV20265_1451, SCV20265_6120, SCV20265_4839, SCV20265_2195, SCV20265_0968, SCV20265_2464, SCV20265_2518, SCV20265_2654, SCV20265_3101, SCV20265_3909, SCV20265_2610, SCV20265_1805, SCV20265_4445, SCV20265_2883, SCV20265_2916, SCV20265_1721, SCV20265_3099, SCV20265_1735, SCV20265_6289, SCV20265_2974, SCV20265_2404, SCV20265_6135, SCV20265_3626, SCV20265_1050, SCV20265_0188, SCV20265_5329, SCV20265_2792, SCV20265_1617, SCV20265_2236, SCV20265_0491, SCV20265_2422, SCV20265_5463, SCV20265_5597, and SCV20265_0241, wherein the presence of said at least one mutation is indicative of a resistance to one or more antimicrobial, e.g. antibiotic, drugs;

[0241] c) identifying said at least one or more antimicrobial, e.g. antibiotic, drugs;

[0242] d) selecting one or more antimicrobial, e.g. antibiotic, drugs different from the ones identified in step c) and being suitable for the treatment of a Pseudomonas infection; and

[0243] e) treating the patient with said one or more antimicrobial, e.g. antibiotic, drugs.

[0244] A seventeenth aspect of the present invention is directed to a method of treating a patient suffering from an antimicrobial drug, e.g. antibiotic, resistant Pseudomonas infection, comprising the steps of:

[0245] a) obtaining or providing a sample containing or suspected of containing at least one Pseudomonas species from the patient;

[0246] b) determining the presence of at least one mutation in at least two genes from the group of genes consisting of SCV20265_1892, SCV20265_5625, SCV20265_1467, SCV20265_5607, SCV20265_3294, SCV20265_1879, SCV20265_5242, SCV20265_2224, SCV20265_0530, SCV20265_3289, SCV20265_1858, SCV20265_2193, SCV20265_6274, SCV20265_2958, SCV20265_3248, SCV20265_1132, SCV20265_1451, SCV20265_6120, SCV20265_4839, SCV20265_2195, SCV20265_0968, SCV20265_2464, SCV20265_2518, SCV20265_2654, SCV20265_3101, SCV20265_3909, SCV20265_2610, SCV20265_1805, SCV20265_4445, SCV20265_2883, SCV20265_2916, SCV20265_1721, SCV20265_3099, SCV20265_1735, SCV20265_6289, SCV20265_2974, SCV20265_2404, SCV20265_6135, SCV20265_3626, SCV20265_1050, SCV20265_0188, SCV20265_5329, SCV20265_2792, SCV20265_1617, SCV20265_2236, SCV20265_0491, SCV20265_2422, SCV20265_5463, SCV20265_5597, and SCV20265_0241, preferably SCV20265_1467, SCV20265_5607, SCV20265_3294, SCV20265_1879, SCV20265_5242, SCV20265_2224, SCV20265_0530, SCV20265_3289, SCV20265_1858, SCV20265_2193, SCV20265_6274, SCV20265_2958, SCV20265_3248, SCV20265_1132, SCV20265_1451, SCV20265_6120, SCV20265_4839, SCV20265_2195, SCV20265_0968, SCV20265_2464, SCV20265_2518, SCV20265_2654, SCV20265_3101, SCV20265_3909, SCV20265_2610, SCV20265_1805, SCV20265_4445, SCV20265_2883, SCV20265_2916, SCV20265_1721, SCV20265_3099, SCV20265_1735, SCV20265_6289, SCV20265_2974, SCV20265_2404, SCV20265_6135, SCV20265_3626, SCV20265_1050, SCV20265_0188, SCV20265_5329, SCV20265_2792, SCV20265_1617, SCV20265_2236, SCV20265_0491, SCV20265_2422, SCV20265_5463, SCV20265_5597, and SCV20265_0241, wherein the presence of said at least two mutations is indicative of a resistance to one or more antimicrobial, e.g. antibiotic, drugs;

[0247] c) identifying said at least one or more antimicrobial, e.g. antibiotic, drugs;

[0248] d) selecting one or more antimicrobial, e.g. antibiotic, drugs different from the ones identified in step c) and being suitable for the treatment of a Pseudomonas infection; and

[0249] e) treating the patient with said one or more antimicrobial, e.g. antibiotic, drugs.

[0250] An eighteenth aspect of the present invention is directed to a method of treating a patient suffering from an antimicrobial drug, e.g. antibiotic, resistant Pseudomonas infection, comprising the steps of:

[0251] a) obtaining or providing a sample containing or suspected of containing at least one Pseudomonas species from the patient;

[0252] b) determining the presence of at least one mutation in at least two genes from the group of genes listed in Table 5, preferably Table 5a, wherein the presence of said at least two mutations is indicative of a resistance to one or more antimicrobial, e.g. antibiotic, drugs;

[0253] c) identifying said at least one or more antimicrobial, e.g. antibiotic, drugs;

[0254] d) selecting one or more antimicrobial, e.g. antibiotic, drugs different from the ones identified in step c) and being suitable for the treatment of a Pseudomonas infection; and

[0255] e) treating the patient with said one or more antimicrobial, e.g. antibiotic, drugs.

[0256] A nineteenth aspect of the present invention is directed to a method of treating a patient suffering from an antimicrobial drug, e.g. antibiotic, resistant Pseudomonas infection, comprising the steps of:

[0257] a) obtaining or providing a sample containing or suspected of containing at least one Pseudomonas species from the patient;

[0258] b) determining the presence of at least one mutation in at least one gene from the group of genes listed in Table 5, preferably Table 5a, wherein the presence of said at least one mutation is indicative of a resistance to one or more antimicrobial, e.g. antibiotic, drugs;

[0259] c) identifying said at least one or more antimicrobial, e.g. antibiotic, drugs;

[0260] d) selecting one or more antimicrobial, e.g. antibiotic, drugs different from the ones identified in step c) and being suitable for the treatment of a Pseudomonas infection; and

[0261] e) treating the patient with said one or more antimicrobial, e.g. antibiotic, drugs.

[0262] Also in the sixteenth to nineteenth aspect of the invention, steps a) to d) are analogous to the steps in the method of the second aspect of the present invention. Step e) can be sufficiently carried out without being restricted and can be done e.g. non-invasively.

[0263] A twentieth aspect of the present invention is directed to a diagnostic method of determining an infection of a patient with Pseudomonas species potentially resistant to antimicrobial drug treatment, which can also be described as method of determining an antimicrobial drug, e.g. antibiotic, resistant Pseudomonas infection of a patient, comprising the steps of:

[0264] a) obtaining or providing a sample containing or suspected of containing at least one Pseudomonas species from the patient;

[0265] b) determining the presence of at least one mutation in at least one gene from the group of genes listed in Table 5, preferably Table 5a, wherein the presence of said at least one mutation is indicative of an antimicrobial drug, e.g. antibiotic, resistant Pseudomonas infection in said patient.

[0266] A twenty-first aspect of the present invention is directed to a method of selecting a treatment of a patient suffering from an antimicrobial drug, e.g. antibiotic, resistant Pseudomonas infection, comprising the steps of:

[0267] a) obtaining or providing a sample containing or suspected of containing at least one Pseudomonas species from the patient;

[0268] b) determining the presence of at least one mutation in at least one gene from the group of genes listed in Table 5, preferably Table 5a, wherein the presence of said at least one mutation is indicative of a resistance to one or more antimicrobial, e.g. antibiotic, drugs;

[0269] c) identifying said at least one or more antimicrobial, e.g. antibiotic, drugs; and

[0270] d) selecting one or more antimicrobial, e.g. antibiotic, drugs different from the ones identified in step c) and being suitable for the treatment of a Pseudomonas infection.

[0271] Again, in the twentieth and the twenty-first aspect the steps correspond to those in the first or second aspect, although only a mutation in at least one gene is determined.

### EXAMPLES

[0272] The present invention will now be described in detail with reference to several examples thereof. However, these examples are illustrative and do not limit the scope of the invention.

### Example 1

[0273] Whole genome sequencing was carried out in addition to classical antimicrobial susceptibility testing of the same isolates for a cohort of 1104 specimens. This allowed performing genome wide correlation studies to find genetic variants (e.g. point mutations, small insertions and deletion, larger structural variants, plasmid copy number gains, gene dosage effects) in the genome and plasmids that are significantly correlated to the resistance against one or several drugs. The approach also allows for comparing the relevant sites in the genome to each other.

[0274] In the approach the different sources of genetic resistance as well as the different ways of how bacteria can become resistant were covered. By measuring clinical isolates collected in a broad geographical area and across a broad time span of three decades a complete picture going far beyond the rather artificial step of laboratory generated resistance mechanisms was tried to be generated.

[0275] To this end, a set of 21 clinically relevant antimicrobial agents with 5 different modes of action was put together, and the minimally inhibitory concentration (MIC) of the 21 drugs for the Pseudomonas isolates was measured.

[0276] The detailed procedure is given in the following:

[0277] Bacterial Strains

[0278] The inventors selected 1104 Pseudomonas strains, particularly Pseudomonas aeruginosa, from the microbiology strain collection at Siemens Healthcare Diagnostics (West Sacramento, Calif.) for susceptibility testing and whole genome sequencing.

[0279] Antimicrobial Susceptibility Testing (AST) Panels

[0280] Frozen reference AST panels were prepared following Clinical Laboratory Standards Institute (CLSI) recommendations. The following antimicrobial agents (with μg/ml concentrations shown in parentheses) were included in the panels: Amoxicillin/K Clavulanate (0.5/0.25-64/32), Ampicillin (0.25-128), Ampicillin/Sulbactam (0.5/0.25-64/32), Aztreonam (0.25-64), Cefazolin (0.5-32), Cefepime (0.25-64), Cefotaxime (0.25-128), Ceftazidime (0.25-64), Ceftriaxone (0.25-128), Cefuroxime (1-64), Cephalothin (1-64), Ciprofloxacin (0.015-8), Ertepenem (0.12-32), Gentamicin (0.12-32), Imipenem (0.25-32), Levofloxacin (0.25-16), Meropenem (0.12-32), Piperacillin/Tazobactam (0.25/4-256/4), Tetracycline (0.5-64), Tobramycin (0.12-32), and Trimethoprim/Sulfamethoxazole (0.25/4.7-32/608). Prior to use with clinical isolates, AST panels were tested with QC strains. AST panels were considered acceptable for testing with clinical isolates when the QC results met QC ranges described by CLSI16.

[0281] Inoculum Preparation

[0282] Isolates were cultured on trypticase soy agar with 5% sheep blood (BBL, Cockeysville, Md.) and incubated in ambient air at 35±1° C. for 18-24 h. Isolated colonies (4-5 large colonies or 5-10 small colonies) were transferred to a 3 ml Sterile Inoculum Water (Siemens) and emulsified to a final turbidity of a 0.5 McFarland standard. 2 ml of this suspension was added to 25 ml Inoculum Water with Pluronic-F (Siemens). Using the Inoculator (Siemens) specific for frozen AST panels, 5 μl of the cell suspension was transferred to each well of the AST panel. The inoculated AST panels were incubated in ambient air at 35±1° C. for 16-20 h. Panel results were read visually, and minimal inhibitory concentrations (MIC) were determined.

[0283] DNA Extraction

[0284] Four streaks of each Gram-negative bacterial isolate cultured on trypticase soy agar containing 5% sheep blood and cell suspensions were made in sterile 1.5 ml collection tubes containing 50 μl Nuclease-Free Water (AM9930, Life Technologies). Bacterial isolate samples were stored at −20° C. until nucleic acid extraction. The Tissue Preparation System (TPS) (096D0382-02_01_B, Siemens) and the VERSANT® Tissue Preparation Reagents (TPR) kit (10632404B, Siemens) were used to ex-tract DNA from these bacterial isolates. Prior to extraction, the bacterial isolates were thawed at room temperature and were pelleted at 2000 G for 5 seconds. The DNA extraction protocol DNAext was used for complete total nucleic acid extraction of 48 isolate samples and eluates, 50 μl each, in 4 hours. The total nucleic acid eluates were then transferred into 96-Well qPCR Detection Plates (401341, Agilent Technologies) for RNase A digestion, DNA quantitation, and plate DNA concentration standardization processes. RNase A (AM2271, Life Technologies) which was diluted in nuclease-free water following manufacturer's instructions was added to 50 μl of the total nucleic acid eluate for a final working concentration of 20 μg/ml. Digestion enzyme and eluate mixture were incubated at 37° C. for 30 minutes using Siemens VERSANT® Amplification and Detection instrument. DNA from the RNase digested eluate was quantitated using the Quant-iT™ PicoGreen dsDNA Assay (P11496, Life Technologies) following the assay kit instruction, and fluorescence was determined on the Siemens VERSANT® Amplification and Detection instrument. Data analysis was performed using Microsoft® Excel 2007. 25 μl of the quantitated DNA eluates were transferred into a new 96-Well PCR plate for plate DNA concentration standardization prior to library preparation. Elution buffer from the TPR kit was used to adjust DNA concentration. The standardized DNA eluate plate was then stored at −80° C. until library preparation.

[0285] Next Generation Sequencing

[0286] Prior to library preparation, quality control of isolated bacterial DNA was conducted using a Qubit 2.0 Fluorometer (Qubit dsDNA BR Assay Kit, Life Technologies) and an Agilent 2200 TapeStation (Genomic DNA ScreenTape, Agilent Technologies). NGS libraries were prepared in 96 well format using NexteraXT DNA Sample Preparation Kit and NexteraXT Index Kit for 96 Indexes (Illumina) according to the manufacturer's protocol. The resulting sequencing libraries were quantified in a qPCR-based approach using the KAPA SYBR FAST qPCR MasterMix Kit (Peqlab) on a ViiA 7 real time PCR system (Life Technologies). 96 samples were pooled per lane for paired-end sequencing (2×100 bp) on Illumina Hiseq2000 or Hiseq2500 sequencers using TruSeq PE Cluster v3 and TruSeq SBS v3 sequncing chemistry (Illumina). Basic sequencing quality parameters were determined using the FastQC quality control tool for high throughput sequence data (Babraham Bioinformatics Institute).

[0287] Data Analysis

[0288] Raw paired-end sequencing data for the 1104 Pseudomonas samples were mapped against the Pseudomonas reference (NC_023149) with BWA 0.6.1.20. The resulting SAM files were sorted, converted to BAM files, and PCR duplicates were marked using the Picard tools package 1.104 (http://picard.sourceforge.net/). The Genome Analysis Toolkit 3.1.1 (GATK)21 was used to call SNPs and indels for blocks of 200 Pseudomonas samples (parameters: -ploidy 1 -glm BOTH -stand_call_conf 30 -stand_emit_conf 10). VCF files were combined into a single file and quality filtering for SNPs was carried out (QD<2.0∥FS>60.0∥MQ<40.0) and indels (QD<2.0∥FS>200.0). Detected variants were annotated with SnpEff22 to predict coding effects. For each annotated position, genotypes of all Pseudomonas samples were considered. Pseudomonas samples were split into two groups, low resistance group (having lower MIC concentration for the considered drug), and high resistance group (having higher MIC concentrations) with respect to a certain MIC concentration (breakpoint). To find the best breakpoint all thresholds were evaluated and p-values were computed with Fisher's exact test relying on a 2×2 contingency table (number of Pseudomonas samples having the reference or variant genotype vs. number of samples belonging to the low and high resistance group). The best computed breakpoint was the threshold yielding the lowest p-value for a certain genomic position and drug. For further analyses positions with non-synonymous alterations and p-value <10⁻¹⁰ were considered.

[0289] Since a potential reason for drug resistance is gene duplication, gene dose dependency was evaluated. For each sample the genomic coverage for each position was determined using BED Tools. Gene ranges were extracted from the reference assembly NC_023149.gff and the normalized median coverage per gene was calculated. To compare low- and high-resistance isolates the best area under the curve (AUC) value was computed. Groups of at least 20% of all samples having a median coverage larger than zero for that gene and containing more than 15 samples per group were considered in order to exclude artifacts and cases with AUC>0.75 were further evaluated.

[0290] To include data on the different ways how resistance mechanisms are acquired Pseudomonas isolates collected over more than three decades were analyzed such that also horizontal gene transfer could potentially be discovered.

[0291] In detail, the following steps were carried out:

[0292] Pseudomonas strains to be tested were seeded on agar plates and incubated under growth conditions for 24 hours. Then, colonies were picked and incubated in growth medium in the presence of a given antibiotic drug in dilution series under growth conditions for 16-20 hours. Bacterial growth was determined by observing turbidity.

[0293] Next mutations were searched that are highly correlated with the results of the phenotypic resistance test.

[0294] For sequencing, samples were prepared using a Nextera library preparation, followed by multiplexed sequencing using the Illuminat HiSeq 2500 system, paired end sequencing. Data were mapped with BWA (Li H. and Durbin R. (2010) Fast and accurate long-read alignment with Burrows-Wheeler Transform. Bioinformatics, Epub. [PMID: 20080505]) and SNP were called using samtools (Li H.*, Handsaker B.*, Wysoker A., Fennell T., Ruan J., Homer N., Marth G., Abecasis G., Durbin R. and 1000 Genome Project Data Processing Subgroup (2009) The Sequence alignment/map (SAM) format and SAMtools. Bioinformatics, 25, 2078-9. [PMID: 19505943]).

[0295] As reference genome, NC_0123149 as annotated at the NCBI was determined as best suited.

[0296] The mutations were matched to the genes and the amino acid changes were calculated. Using different algorithms (SVM, homology modeling) mutations leading to amino acid changes with likely pathogenicity/resistance were calculated.

[0297] In total, whole genomes and plasmids of 1104 different clinical isolates of Pseudomonas species were sequenced, and classical antimicrobial susceptibility testing (AST) against 21 therapy forms as described above was performed for all organisms. From the classical AST a table with 1104 rows (isolates) and 21 columns (MIC values for 21 drugs) was obtained. Each table entry contained the MIC for the respective isolate and the respective drug. The genetic data were mapped to different reference genomes of Pseudomonas that have been annotated at the NCBI (http://www.ncbi.nlm.nih.gov/), and the best reference was chosen as template for the alignment—NC_023149 as annotated at the NCBI. Additionally, assemblies were carried out and it was verified that the sequenced genomes fulfil all quality criteria to become reference genomes.

[0298] Next, genetic variants were evaluated. This approach resulted in a table with the genetic sites in columns and the same isolates in 1104 rows. Each table entry contained the genetic determinant at the respective site (A, C, T, G, small insertions and deletions, . . . ) for the respective isolate.

[0299] In a next step different statistical tests were carried out
[0300] 1) For comparing resistance/susceptibility to genetic sites we calculated contingency tables and determined the significance using Fishers test
[0301] 2) For comparing different sites to each other we calculated the correlation between different genetic sites
[0302] 3) For detecting gene dosage effects, e.g. loss or gain of genes (in the genome or on plasmids) we calculated the coverage (i.e. how many read map to the current position) at each site for resistant and not resistant isolates.

[0303] From the data, first the 50 genes with the best p-value were chosen for the list of mutations as well as the list of correlated antibiotic resistance, representing Tables 1 and 2.

[0304] A full list of all genetic sites, drugs, drug classes, affected genes etc. is provided in Tables 3 and 4a, 4b and 4c, wherein Table 3 corresponds to Table 1 and represents the genes having the lowest p-values after determining mutations in the genes, and Table 4, respectively Tables 4a, 4b and 4c correspond to Table 2 and represent the genes having the lowest p-values after correlating the mutations with antibiotic resistance for the respective antibiotics.

[0305] In addition, the data with the best p-values for each antibiotic class with the most antibiotic drugs, respectively, were evaluated, being disclosed in Tables 5-9.

[0306] In Tables 3-9 the columns are designated as follows: Gene name: affected gene;

[0307] POS: genomic position of the SNP/variant in the Pseudomonas reference genome (see above);

[0308] p-value: significance value calculated using Fishers exact test (determined according to FDR (Benjamini Hochberg) method (Benjamini Hochberg, 1995));

[0309] genbank protein accession number: (NCBI) Accession number of the corresponding protein of the genes

[0310] Also the antibiotic/drug classes, the number of significant antibiotics correlated to the mutations (over all antibiotics or over certain classes), as well as the correlated antibiotics are denoted in the Tables.

TABLE 3
Detailed results for the genes in Example 1 (corresponding to Table 1)

| | | #drug | | | genbank protein |
|---|---|---|---|---|---|
| POS | drug class | classes | p-value | gene name | accession number |
| 1979239 | other (benzene derived)/sulfonamide; | 4 | 1.5814E−141 | SCV20265_1892 | YP_008980900.1 |
| | aminoglycoside; quinolone*; Lactams | | | | |
| 5987559 | other (benzene derived)/sulfonamide; | 4 | 1.2153E−121 | SCV20265_5625 | YP_008984625.1 |
| | aminoglycoside; quinolone*; Lactams | | | | |
| 1537406 | other (benzene derived)/sulfonamide; | 4 | 1.53793E−41 | SCV20265_1467 | YP_008980475.1 |
| | aminoglycoside; quinolone*; Lactams | | | | |
| 5965080 | other (benzene derived)/sulfonamide; | 4 | 4.52474E−39 | SCV20265_5607 | YP_008984607.1 |
| | aminoglycoside; Lactams; quinolone* | | | | |
| 3513162 | other (benzene derived)/sulfonamide; | 3 | 1.34708E−37 | SCV20265_3294 | YP_008982302.1 |
| | aminoglycoside; quinolone* | | | | |
| 1967346 | other (benzene derived)/sulfonamide; | 4 | 1.53005E−37 | SCV20265_1879 | YP_008980887.1 |
| | aminoglycoside; Lactams; quinolone* | | | | |
| 5569783 | other (benzene derived)/sulfonamide; | 4 | 2.19789E−37 | SCV20265_5242 | YP_008984242.1 |
| | aminoglycoside; quinolone*; Lactams | | | | |
| 2350860 | other (benzene derived)/sulfonamide; | 4 | 2.41127E−37 | SCV20265_2224 | YP_008981232.1 |
| | aminoglycoside; Lactams; quinolone* | | | | |
| 562872 | other (benzene derived)/sulfonamide; | 4 | 3.4301E−37 | SCV20265_0530 | YP_008979538.1 |
| | aminoglycoside; quinolone*; Lactams | | | | |
| 3507580 | other (benzene derived)/sulfonamide; | 4 | 6.35793E−37 | SCV20265_3289 | YP_008982297.1 |
| | aminoglycoside; quinolone*; Lactams | | | | |
| 1947689 | other (benzene derived)/sulfonamide; | 4 | 6.77112E−37 | SCV20265_1858 | YP_008980866.1 |
| | aminoglycoside; quinolone*; Lactams | | | | |
| 2316386 | other (benzene derived)/sulfonamide; | 4 | 6.77112E−37 | SCV20265_2193 | YP_008981201.1 |
| | aminoglycoside; quinolone*; Lactams | | | | |
| 6685845 | other (benzene derived)/sulfonamide; | 4 | 7.04031E−37 | SCV20265_6274 | YP_008985270.1 |
| | aminoglycoside; quinolone*; Lactams | | | | |
| 3142437 | other (benzene derived)/sulfonamide; | 4 | 9.40137E−37 | SCV20265_2958 | YP_008981966.1 |
| | aminoglycoside; quinolone*; Lactams | | | | |
| 3468647 | other (benzene derived)/sulfonamide; | 4 | 1.00069E−36 | SCV20265_3248 | YP_008982256.1 |
| | aminoglycoside; quinolone*; Lactams | | | | |
| 1194383 | other (benzene derived)/sulfonamide; | 3 | 1.4119E−36 | SCV20265_1132 | YP_008980140.1 |
| | aminoglycoside; quinolone* | | | | |
| 1521674 | other (benzene derived)/sulfonamide; | 4 | 2.1786E−36 | SCV20265_1451 | YP_008980459.1 |
| | aminoglycoside; quinolone*; Lactams | | | | |
| 6520799 | other (benzene derived)/sulfonamide; | 4 | 2.1786E−36 | SCV20265_6120 | YP_008985116.1 |
| | aminoglycoside; quinolone*; Lactams | | | | |
| 5124971 | other (benzene derived)/sulfonamide; | 4 | 2.77592E−36 | SCV20265_4839 | YP_008983839.1 |
| | aminoglycoside; quinolone*; Lactams | | | | |
| 2317909 | other (benzene derived)/sulfonamide; | 4 | 3.14019E−36 | SCV20265_2195 | YP_008981203.1 |
| | aminoglycoside; quinolone*; Lactams | | | | |
| 1009933 | other (benzene derived)/sulfonamide; | 4 | 6.88119E−36 | SCV20265_0968 | YP_008979976.1 |
| | aminoglycoside; quinolone*; Lactams | | | | |
| 2567532 | other (benzene derived)/sulfonamide; | 4 | 6.88119E−36 | SCV20265_2464 | YP_008981472.1 |
| | aminoglycoside; quinolone*; Lactams | | | | |
| 2611669 | other (benzene derived)/sulfonamide; | 4 | 8.15723E−36 | SCV20265_2518 | YP_008981526.1 |
| | aminoglycoside; quinolone*; Lactams | | | | |
| 2754829 | other (benzene derived)/sulfonamide; | 4 | 1.05377E−35 | SCV20265_2654 | YP_008981662.1 |
| | aminoglycoside; quinolone*; Lactams | | | | |
| 3301233 | other (benzene derived)/sulfonamide; | 4 | 1.16268E−35 | SCV20265_3101 | YP_008982109.1 |
| | aminoglycoside; quinolone*; Lactams | | | | |
| 4166792 | other (benzene derived)/sulfonamide; | 3 | 1.22608E−35 | SCV20265_3909 | YP_008982913.1 |
| | aminoglycoside; quinolone* | | | | |
| 2709322 | other (benzene derived)/sulfonamide; | 3 | 1.42715E−35 | SCV20265_2610 | YP_008981618.1 |
| | aminoglycoside; quinolone* | | | | |
| 1899865 | other (benzene derived)/sulfonamide; | 4 | 2.06037E−35 | SCV20265_1805 | YP_008980813.1 |
| | aminoglycoside; quinolone*; Lactams | | | | |
| 4712288 | other (benzene derived)/sulfonamide; | 4 | 3.00478E−35 | SCV20265_4445 | YP_008983447.1 |
| | aminoglycoside; quinolone*; Lactams | | | | |
| 3019764 | other (benzene derived)/sulfonamide; | 4 | 4.72183E−35 | SCV20265_2883 | YP_008981891.1 |
| | aminoglycoside; Lactams; quinolone* | | | | |
| 3068671 | other (benzene derived)/sulfonamide; | 3 | 4.72183E−35 | SCV20265_2916 | YP_008981924.1 |
| | aminoglycoside; quinolone* | | | | |
| 1805165 | other (benzene derived)/sulfonamide; | 4 | 6.32018E−35 | SCV20265_1721 | YP_008980729.1 |
| | aminoglycoside; quinolone*; Lactams | | | | |
| 3299685 | other (benzene derived)/sulfonamide; | 4 | 7.83399E−35 | SCV20265_3099 | YP_008982107.1 |
| | aminoglycoside; quinolone*; Lactams | | | | |
| 1821163 | other (benzene derived)/sulfonamide; | 4 | 8.13473E−35 | SCV20265_1735 | YP_008980743.1 |
| | aminoglycoside; quinolone*; Lactams | | | | |
| 6702956 | other (benzene derived)/sulfonamide; | 4 | 1.19545E−34 | SCV20265_6289 | YP_008985285.1 |
| | aminoglycoside; quinolone*; Lactams | | | | |
| 3160788 | other (benzene derived)/sulfonamide; | 4 | 1.22139E−34 | SCV20265_2974 | YP_008981982.1 |
| | aminoglycoside; quinolone*; Lactams | | | | |
| 2515627 | other (benzene derived)/sulfonamide; | 3 | 1.4692E−34 | SCV20265_2404 | YP_008981412.1 |
| | aminoglycoside; quinolone* | | | | |
| 6535290 | other (benzene derived)/sulfonamide; | 4 | 1.91732E−34 | SCV20265_6135 | YP_008985131.1 |
| | aminoglycoside; quinolone*; Lactams | | | | |
| 3881624 | other (benzene derived)/sulfonamide; | 4 | 2.22675E−34 | SCV20265_3626 | YP_008982632.1 |
| | aminoglycoside; quinolone*; Lactams | | | | |
| 1099519 | other (benzene derived)/sulfonamide; | 4 | 2.28786E−34 | SCV20265_1050 | YP_008980058.1 |
| | aminoglycoside; quinolone*; Lactams | | | | |
| 208902 | other (benzene derived)/sulfonamide; | 3 | 2.57554E−34 | SCV20265_0188 | YP_008979196.1 |
| | aminoglycoside; quinolone* | | | | |
| 5662982 | other (benzene derived)/sulfonamide; | 4 | 2.57554E−34 | SCV20265_5329 | YP_008984329.1 |
| | aminoglycoside; quinolone*; Lactams | | | | |
| 2903129 | other (benzene derived)/sulfonamide; | 4 | 3.70304E−34 | SCV20265_2792 | YP_008981800.1 |
| | aminoglycoside; quinolone*; Lactams | | | | |
| 1701758 | other (benzene derived)/sulfonamide; | 3 | 4.18431E−34 | SCV20265_1617 | YP_008980625.1 |
| | aminoglycoside; quinolone* | | | | |
| 2363393 | other (benzene derived)/sulfonamide; | 4 | 4.29029E−34 | SCV20265_2236 | YP_008981244.1 |
| | aminoglycoside; quinolone*; Lactams | | | | |
| 525701 | other (benzene derived)/sulfonamide; | 3 | 5.23384E−34 | SCV20265_0491 | YP_008979499.1 |
| | aminoglycoside; quinolone* | | | | |
| 2530203 | other (benzene derived)/sulfonamide; | 3 | 8.9244E−34 | SCV20265_2422 | YP_008981430.1 |
| | aminoglycoside; quinolone* | | | | |
| 5806684 | other (benzene derived)/sulfonamide; | 3 | 8.9244E−34 | SCV20265_5463 | YP_008984463.1 |
| | aminoglycoside; quinolone* | | | | |
| 5954547 | other (benzene derived)/sulfonamide; | 3 | 8.9244E−34 | SCV20265_5597 | YP_008984597.1 |
| | aminoglycoside; quinolone* | | | | |
| 261978 | other (benzene derived)/sulfonamide; | 3 | 9.16531E−34 | SCV20265_0241 | YP_008979249.1 |
| | aminoglycoside; quinolone* | | | | |
| 2350862 | other (benzene derived)/sulfonamide; | 4 | 2.41127E−37 | SCV20265_2224 | YP_008981232.1 |
| | aminoglycoside; Lactams; quinolone* | | | | |
| 3507601 | other (benzene derived)/sulfonamide; | 4 | 1.78947E−35 | SCV20265_3289 | YP_008982297.1 |
| | aminoglycoside; quinolone*; Lactams | | | | |
| 3507667 | other (benzene derived)/sulfonamide; | 4 | 1.87651E−35 | SCV20265_3289 | YP_008982297.1 |
| | aminoglycoside; quinolone*; Lactams | | | | |
| 6519971 | other (benzene derived)/sulfonamide; | 4 | 5.23384E−34 | SCV20265_6120 | YP_008985116.1 |
| | aminoglycoside; quinolone*; Lactams | | | | |

*fluoroquinolone

TABLE 4a
Detailed results for the genes in Example 1 (corresponding to Table 2)

| | | | | #drug |
|---|---|---|---|---|
| POS | drug | # drugs | drug class | classes |
| 1979239 | T/S; CP; CFT; LVX; GM; IMP; ETP; MER; | 14 | other (benzene derived)/sulfonamide; | 4 |
| | CAX; AZT; P/T; CPE; CAZ; TO | | aminoglycoside; quinolone*; Lactams | |
| 5987559 | T/S; CP; CFT; LVX; GM; IMP; ETP; MER; | 14 | other (benzene derived)/sulfonamide; | 4 |
| | CAX; AZT; P/T; CPE; CAZ; TO | | aminoglycoside; quinolone*; Lactams | |
| 1537406 | T/S; CP; LVX; GM; P/T; TO; CPE | 7 | other (benzene derived)/sulfonamide; | 4 |
| | | | aminoglycoside; quinolone*; Lactams | |
| 5965080 | T/S; CP; GM; P/T; LVX; TO | 6 | other (benzene derived)/sulfonamide; | 4 |
| | | | aminoglycoside; Lactams; quinolone* | |
| 3513162 | T/S; LVX; CP; TO; GM | 5 | other (benzene derived)/sulfonamide; | 3 |
| | | | aminoglycoside; quinolone* | |
| 1967346 | T/S; CP; GM; P/T; LVX; TO | 6 | other (benzene derived)/sulfonamide; | 4 |
| | | | aminoglycoside; Lactams; quinolone* | |
| 5569783 | T/S; CP; LVX; GM; TO; CPE | 6 | other (benzene derived)/sulfonamide; | 4 |
| | | | aminoglycoside; quinolone*; Lactams | |
| 2350860 | T/S; CP; GM; P/T; LVX; TO | 6 | other (benzene derived)/sulfonamide; | 4 |
| | | | aminoglycoside; Lactams; quinolone* | |
| 562872 | T/S; CP; LVX; GM; TO; CPE | 6 | other (benzene derived)/sulfonamide; | 4 |
| | | | aminoglycoside; quinolone*; Lactams | |
| 3507580 | T/S; CP; LVX; GM; TO; CPE | 6 | other (benzene derived)/sulfonamide; | 4 |
| | | | aminoglycoside; quinolone*; Lactams | |
| 1947689 | T/S; CP; LVX; GM; TO; CPE | 6 | other (benzene derived)/sulfonamide; | 4 |
| | | | aminoglycoside; quinolone*; Lactams | |
| 2316386 | T/S; CP; LVX; GM; TO; CPE | 6 | other (benzene derived)/sulfonamide; | 4 |
| | | | aminoglycoside; quinolone*; Lactams | |
| 6685845 | T/S; CP; LVX; GM; TO; CPE | 6 | other (benzene derived)/sulfonamide; | 4 |
| | | | aminoglycoside; quinolone*; Lactams | |
| 3142437 | T/S; CP; LVX; GM; TO; CPE | 6 | other (benzene derived)/sulfonamide; | 4 |
| | | | aminoglycoside; quinolone*; Lactams | |
| 3468647 | T/S; CP; LVX; GM; TO; CPE | 6 | other (benzene derived)/sulfonamide; | 4 |
| | | | aminoglycoside; quinolone*; Lactams | |
| 1194383 | T/S; LVX; CP; TO; GM | 5 | other (benzene derived)/sulfonamide; | 3 |
| | | | aminoglycoside; quinolone* | |
| 1521674 | T/S; CP; LVX; GM; TO; CPE | 6 | other (benzene derived)/sulfonamide; | 4 |
| | | | aminoglycoside; quinolone*; Lactams | |
| 6520799 | T/S; CP; LVX; GM; TO; CPE | 6 | other (benzene derived)/sulfonamide; | 4 |
| | | | aminoglycoside; quinolone*; Lactams | |
| 5124971 | T/S; CP; LVX; GM; TO; CPE | 6 | other (benzene derived)/sulfonamide; | 4 |
| | | | aminoglycoside; quinolone*; Lactams | |
| 2317909 | T/S; CP; LVX; GM; TO; CPE | 6 | other (benzene derived)/sulfonamide; | 4 |
| | | | aminoglycoside; quinolone*; Lactams | |
| 1009933 | T/S; CP; LVX; GM; TO; CPE | 6 | other (benzene derived)/sulfonamide; | 4 |
| | | | aminoglycoside; quinolone*; Lactams | |
| 2567532 | T/S; CP; LVX; GM; TO; CPE | 6 | other (benzene derived)/sulfonamide; | 4 |
| | | | aminoglycoside; quinolone*; Lactams | |
| 2611669 | T/S; CP; LVX; GM; TO; CPE | 6 | other (benzene derived)/sulfonamide; | 4 |
| | | | aminoglycoside; quinolone*; Lactams | |
| 2754829 | T/S; CP; LVX; GM; ETP; TO; CPE | 7 | other (benzene derived)/sulfonamide; | 4 |
| | | | aminoglycoside; quinolone*; Lactams | |
| 3301233 | T/S; CP; GM; ETP; LVX; TO | 6 | other (benzene derived)/sulfonamide; | 4 |
| | | | aminoglycoside; quinolone*; Lactams | |
| 4166792 | T/S; LVX; CP; TO; GM | 5 | other (benzene derived)/sulfonamide; | 3 |
| | | | aminoglycoside; quinolone* | |
| 2709322 | T/S; LVX; CP; TO; GM | 5 | other (benzene derived)/sulfonamide; | 3 |
| | | | aminoglycoside; quinolone* | |
| 1899865 | T/S; CP; LVX; GM; TO; CPE | 6 | other (benzene derived)/sulfonamide; | 4 |
| | | | aminoglycoside; quinolone*; Lactams | |
| 4712288 | T/S; CP; LVX; GM; TO; CPE | 6 | other (benzene derived)/sulfonamide; | 4 |
| | | | aminoglycoside; quinolone*; Lactams | |
| 3019764 | T/S; CP; GM; P/T; LVX; TO | 6 | other (benzene derived)/sulfonamide; | 4 |
| | | | aminoglycoside; Lactams; quinolone* | |
| 3068671 | T/S; LVX; CP; TO; GM | 5 | other (benzene derived)/sulfonamide; | 3 |
| | | | aminoglycoside; quinolone* | |
| 1805165 | T/S; CP; LVX; GM; TO; CPE | 6 | other (benzene derived)/sulfonamide; | 4 |
| | | | aminoglycoside; quinolone*; Lactams | |
| 3299685 | T/S; CP; GM; ETP; LVX; TO | 6 | other (benzene derived)/sulfonamide; | 4 |
| | | | aminoglycoside; quinolone*; Lactams | |
| 1821163 | T/S; CP; LVX; GM; TO; CPE | 6 | other (benzene derived)/sulfonamide; | 4 |
| | | | aminoglycoside; quinolone*; Lactams | |
| 6702956 | T/S; CP; LVX; GM; P/T; TO; CPE | 7 | other (benzene derived)/sulfonamide; | |
| | | | aminoglycoside; quinolone*; Lactams | |
| 3160788 | T/S; CP; LVX; GM; TO; CPE | 6 | other (benzene derived)/sulfonamide; | 4 |
| | | | aminoglycoside; quinolone*; Lactams | |
| 2515627 | T/S; LVX; CP; TO; GM | 5 | other (benzene derived)/sulfonamide; | 4 |
| | | | aminoglycoside; quinolone* | |
| 6535290 | T/S; CP; LVX; GM; TO; CPE | 6 | other (benzene derived)/sulfonamide; | 3 |
| | | | aminoglycoside; quinolone*; Lactams | |
| 3881624 | T/S; CP; LVX; GM; P/T; TO; CPE | 7 | other (benzene derived)/sulfonamide; | 4 |
| | | | aminoglycoside; quinolone*; Lactams | |
| 1099519 | T/S; CP; LVX; GM; ETP; TO; CPE | 7 | other (benzene derived)/sulfonamide; | 4 |
| | | | aminoglycoside; quinolone*; Lactams | |
| 208902 | T/S; LVX; CP; TO; GM | 5 | other (benzene derived)/sulfonamide; | 4 |
| | | | aminoglycoside; quinolone* | |
| 5662982 | T/S; CP; LVX; GM; TO; CPE | 6 | other (benzene derived)/sulfonamide; | 3 |
| | | | aminoglycoside; quinolone*; Lactams | |
| 2903129 | T/S; CP; LVX; GM; TO; CPE | 6 | other (benzene derived)/sulfonamide; | 4 |
| | | | aminoglycoside; quinolone*; Lactams | |
| 1701758 | T/S; LVX; CP; TO; GM | 5 | other (benzene derived)/sulfonamide; | 4 |
| | | | aminoglycoside; quinolone* | |
| 2363393 | T/S; CP; LVX; GM; TO; CPE | 6 | other (benzene derived)/sulfonamide; | 3 |
| | | | aminoglycoside; quinolone*; Lactams | |
| 525701 | T/S; LVX; CP; TO; GM | 5 | other (benzene derived)/sulfonamide; | 4 |
| | | | aminoglycoside; quinolone* | |
| 2530203 | T/S; LVX; CP; TO; GM | 5 | other (benzene derived)/sulfonamide; | 3 |
| | | | aminoglycoside; quinolone* | |
| 5806684 | T/S; LVX; CP; TO; GM | 5 | other (benzene derived)/sulfonamide; | 3 |
| | | | aminoglycoside; quinolone* | |
| 5954547 | T/S; LVX; CP; TO; GM | 5 | other (benzene derived)/sulfonamide; | 3 |
| | | | aminoglycoside; quinolone* | |
| 261978 | T/S; LVX; CP; TO; GM | 5 | other (benzene derived)/sulfonamide; | 3 |
| | | | aminoglycoside; quinolone* | |
| 2350862 | T/S; CP; GM; P/T; LVX; TO | 6 | other (benzene derived)/sulfonamide; | 4 |
| | | | aminoglycoside; Lactams; quinolone* | |
| 3507601 | T/S; CP; LVX; GM; TO; CPE | 6 | other (benzene derived)/sulfonamide; | 4 |
| | | | aminoglycoside; quinolone*; Lactams | |
| 3507667 | T/S; CP; LVX; GM; TO; CPE | 6 | other (benzene derived)/sulfonamide; | 4 |
| | | | aminoglycoside; quinolone*; Lactams | |
| 6519971 | T/S; CP; LVX; GM; TO; CPE | 6 | other (benzene derived)/sulfonamide; | 4 |
| | | | aminoglycoside; quinolone*; Lactams | |

*fluoroquinolone

TABLE 4b
Detailed results for the genes in Example 1 (corresponding to Table 2, continued)

| | | | | | #significant | #significant |
|---|---|---|---|---|---|---|
| | best | #significant | #significant | #significant | polyketide | other (benzene |
| POS | drug | Lactams | fluoroquinolones | aminoglycosides | (tetracycline) | derived)/sulfonamide |
| 1979239 | CP | 9 | 2 | 2 | 0 | 1 |
| 5987559 | CP | 9 | 2 | 2 | 0 | 1 |
| 1537406 | T/S | 2 | 2 | 2 | 0 | 1 |
| 5965080 | T/S | 1 | 2 | 2 | 0 | 1 |
| 3513162 | T/S | 0 | 2 | 2 | 0 | 1 |
| 1967346 | T/S | 1 | 2 | 2 | 0 | 1 |
| 5569783 | T/S | 1 | 2 | 2 | 0 | 1 |
| 2350860 | T/S | 1 | 2 | 2 | 0 | 1 |
| 562872 | T/S | 1 | 2 | 2 | 0 | 1 |
| 3507580 | T/S | 1 | 2 | 2 | 0 | 1 |
| 1947689 | T/S | 1 | 2 | 2 | 0 | 1 |
| 2316386 | T/S | 1 | 2 | 2 | 0 | 1 |
| 6685845 | T/S | 1 | 2 | 2 | 0 | 1 |
| 3142437 | T/S | 1 | 2 | 2 | 0 | 1 |
| 3468647 | T/S | 1 | 2 | 2 | 0 | 1 |
| 1194383 | T/S | 0 | 2 | 2 | 0 | 1 |
| 1521674 | T/S | 1 | 2 | 2 | 0 | 1 |
| 6520799 | T/S | 1 | 2 | 2 | 0 | 1 |
| 5124971 | T/S | 1 | 2 | 2 | 0 | 1 |
| 2317909 | T/S | 1 | 2 | 2 | 0 | 1 |
| 1009933 | T/S | 1 | 2 | 2 | 0 | 1 |
| 2567532 | T/S | 1 | 2 | 2 | 0 | 1 |
| 2611669 | T/S | 1 | 2 | 2 | 0 | 1 |
| 2754829 | T/S | 2 | 2 | 2 | 0 | 1 |
| 3301233 | T/S | 1 | 2 | 2 | 0 | 1 |
| 4166792 | T/S | 0 | 2 | 2 | 0 | 1 |
| 2709322 | T/S | 0 | 2 | 2 | 0 | 1 |
| 1899865 | T/S | 1 | 2 | 2 | 0 | 1 |
| 4712288 | T/S | 1 | 2 | 2 | 0 | 1 |
| 3019764 | T/S | 1 | 2 | 2 | 0 | 1 |
| 3068671 | T/S | 0 | 2 | 2 | 0 | 1 |
| 1805165 | T/S | 1 | 2 | 2 | 0 | 1 |
| 3299685 | T/S | 1 | 2 | 2 | 0 | 1 |
| 1821163 | T/S | 1 | 2 | 2 | 0 | 1 |
| 6702956 | T/S | 2 | 2 | 2 | 0 | 1 |
| 3160788 | T/S | 1 | 2 | 2 | 0 | 1 |
| 2515627 | T/S | 0 | 2 | 2 | 0 | 1 |
| 6535290 | T/S | 1 | 2 | 2 | 0 | 1 |
| 3881624 | T/S | 2 | 2 | 2 | 0 | 1 |
| 1099519 | T/S | 2 | 2 | 2 | 0 | 1 |
| 208902 | T/S | 0 | 2 | 2 | 0 | 1 |
| 5662982 | T/S | 1 | 2 | 2 | 0 | 1 |
| 2903129 | T/S | 1 | 2 | 2 | 0 | 1 |
| 1701758 | T/S | 0 | 2 | 2 | 0 | 1 |
| 2363393 | T/S | 1 | 2 | 2 | 0 | 1 |
| 525701 | T/S | 0 | 2 | 2 | 0 | 1 |
| 2530203 | T/S | 0 | 2 | 2 | 0 | 1 |
| 5806684 | T/S | 0 | 2 | 2 | 0 | 1 |
| 5954547 | T/S | 0 | 2 | 2 | 0 | 1 |
| 261978 | T/S | 0 | 2 | 2 | 0 | 1 |
| 2350862 | T/S | 1 | 2 | 2 | 0 | 1 |
| 3507601 | T/S | 1 | 2 | 2 | 0 | 1 |
| 3507667 | T/S | 1 | 2 | 2 | 0 | 1 |
| 6519971 | T/S | 1 | 2 | 2 | 0 | 1 |

TABLE 4c
Detailed results for the genes in Example
1 (corresponding to Table 2, continued)

| | | | genbank protein |
|---|---|---|---|
| POS | p-value | gene name | accession number |
| 1979239 | 1.5814E−141 | SCV20265_1892 | YP_008980900.1 |
| 5987559 | 1.2153E−121 | SCV20265_5625 | YP_008984625.1 |
| 1537406 | 1.53793E−41 | SCV20265_1467 | YP_008980475.1 |
| 5965080 | 4.52474E−39 | SCV20265_5607 | YP_008984607.1 |
| 3513162 | 1.34708E−37 | SCV20265_3294 | YP_008982302.1 |
| 1967346 | 1.53005E−37 | SCV20265_1879 | YP_008980887.1 |
| 5569783 | 2.19789E−37 | SCV20265_5242 | YP_008984242.1 |
| 2350860 | 2.41127E−37 | SCV20265_2224 | YP_008981232.1 |
| 562872 | 3.4301E−37 | SCV20265_0530 | YP_008979538.1 |
| 3507580 | 6.35793E−37 | SCV20265_3289 | YP_008982297.1 |
| 1947689 | 6.77112E−37 | SCV20265_1858 | YP_008980866.1 |
| 2316386 | 6.77112E−37 | SCV20265_2193 | YP_008981201.1 |
| 6685845 | 7.04031E−37 | SCV20265_6274 | YP_008985270.1 |
| 3142437 | 9.40137E−37 | SCV20265_2958 | YP_008981966.1 |
| 3468647 | 1.00069E−36 | SCV20265_3248 | YP_008982256.1 |
| 1194383 | 1.4119E−36 | SCV20265_1132 | YP_008980140.1 |
| 1521674 | 2.1786E−36 | SCV20265_1451 | YP_008980459.1 |
| 6520799 | 2.1786E−36 | SCV20265_6120 | YP_008985116.1 |
| 5124971 | 2.77592E−36 | SCV20265_4839 | YP_008983839.1 |
| 2317909 | 3.14019E−36 | SCV20265_2195 | YP_008981203.1 |
| 1009933 | 6.88119E−36 | SCV20265_0968 | YP_008979976.1 |
| 2567532 | 6.88119E−36 | SCV20265_2464 | YP_008981472.1 |
| 2611669 | 8.15723E−36 | SCV20265_2518 | YP_008981526.1 |
| 2754829 | 1.05377E−35 | SCV20265_2654 | YP_008981662.1 |
| 3301233 | 1.16268E−35 | SCV20265_3101 | YP_008982109.1 |
| 4166792 | 1.22608E−35 | SCV20265_3909 | YP_008982913.1 |
| 2709322 | 1.42715E−35 | SCV20265_2610 | YP_008981618.1 |
| 1899865 | 2.06037E−35 | SCV20265_1805 | YP_008980813.1 |
| 4712288 | 3.00478E−35 | SCV20265_4445 | YP_008983447.1 |
| 3019764 | 4.72183E−35 | SCV20265_2883 | YP_008981891.1 |
| 3068671 | 4.72183E−35 | SCV20265_2916 | YP_008981924.1 |
| 1805165 | 6.32018E−35 | SCV20265_1721 | YP_008980729.1 |
| 3299685 | 7.83399E−35 | SCV20265_3099 | YP_008982107.1 |
| 1821163 | 8.13473E−35 | SCV20265_1735 | YP_008980743.1 |
| 6702956 | 1.19545E−34 | SCV20265_6289 | YP_008985285.1 |
| 3160788 | 1.22139E−34 | SCV20265_2974 | YP_008981982.1 |
| 2515627 | 1.4692E−34 | SCV20265_2404 | YP_008981412.1 |
| 6535290 | 1.91732E−34 | SCV20265_6135 | YP_008985131.1 |
| 3881624 | 2.22675E−34 | SCV20265_3626 | YP_008982632.1 |
| 1099519 | 2.28786E−34 | SCV20265_1050 | YP_008980058.1 |
| 208902 | 2.57554E−34 | SCV20265_0188 | YP_008979196.1 |
| 5662982 | 2.57554E−34 | SCV20265_5329 | YP_008984329.1 |
| 2903129 | 3.70304E−34 | SCV20265_2792 | YP_008981800.1 |
| 1701758 | 4.18431E−34 | SCV20265_1617 | YP_008980625.1 |
| 2363393 | 4.29029E−34 | SCV20265_2236 | YP_008981244.1 |
| 525701 | 5.23384E−34 | SCV20265_0491 | YP_008979499.1 |
| 2530203 | 8.9244E−34 | SCV20265_2422 | YP_008981430.1 |
| 5806684 | 8.9244E−34 | SCV20265_5463 | YP_008984463.1 |
| 5954547 | 8.9244E−34 | SCV20265_5597 | YP_008984597.1 |
| 261978 | 9.16531E−34 | SCV20265_0241 | YP_008979249.1 |
| 2350862 | 2.41127E−37 | SCV20265_2224 | YP_008981232.1 |
| 3507601 | 1.78947E−35 | SCV20265_3289 | YP_008982297.1 |
| 3507667 | 1.87651E−35 | SCV20265_3289 | YP_008982297.1 |
| 6519971 | 5.23384E−34 | SCV20265_6120 | YP_008985116.1 |

[0311] The p-value was calculated using the Fisher exact test based on contingency table with 4 fields: #samples Resistant/wild type; #samples Resistant/mutant; #samples not Resistant/wild type; #samples not Resistant/mutant

[0312] The test is based on the distribution of the samples in the 4 fields. Even distribution indicates no significance, while clustering into two fields indicates significance.

[0313] The following results were obtained
[0314] A total of 6,734 different correlations between genetic sites and anti-microbial agents were detected (p-value <10⁻¹⁰).
[0315] The biggest part of these were point mutations (i.e. single base exchanges)
[0316] The highest significances (10⁻¹⁴¹ and 10⁻¹²¹) were reached for non-synonymous codings in YP_008980900.1 and YP_008984625.1, respectively, particular in positions 1979239 and/or 5987559, respectively, with regard to reference genome NC_023149 as annotated at the NCBI; the mutation in position 1979239 with regard to reference genome NC_023149 as annotated at the NCBI is a non-synonymous coding, particularly a codon change aCc/aTc;aCc/aAc, and the mutation in position 5987559 with regard to reference genome NC_023149 as annotated at the NCBI is a non-synonymous coding, particularly a codon change tCg/tTg;tCg/tGg
[0317] Besides these, insertions or deletions of up to four bases were discovered
[0318] Further, potential genetic tests for four different drug classes relating to resistances were discovered
   [0319] β-lactams (includes Penicillins, Cephalosporins, Carbapenems, Monobactams)
   [0320] Quinolones, particularly Fluoroquinolones
   [0321] Aminoglycosides
   [0322] Folate synthesis inhibitors
[0323] Potential genetic tests for the tested drugs/drug combinations were discovered:

[0324] Amoxicillin/Clavulanate, Ampicillin, Ampicillin/Sulbactam, Aztreonam, Cefazolin, Cefepime, Ceftazidime, Cefuroxime, Cephalothin, Imipenem, Piperacillin/Tazobactam, Ciprofloxacin, Levofloxacin, Gentamycin, Tobramycin, Tetracycline, Trimethoprim/Sulfamethoxazol
[0325] Mutations were observed in 2,757 different genes

[0326] While in the tables only the best mutations in each gene are represented, a manifold of different SNPs has been found for each gene. Examples for multiple SNPs for two of the genes given in Table 3 are shown in the following Tables 10 and 11.

TABLE 10
Statistically significant SNPs in gene
SCV20265_0188 (genbank protein accession number
YP_008979196.1) (headers as in Tables 3 and 4, respectively)

| | | | | best | |
|---|---|---|---|---|---|
| POS | drug | #drugs | drug class | drug | p-value |
| 209137 | T/S | 1 | Other* | T/S | 3.0930E−012 |
| 209054 | T/S | 1 | Other* | T/S | 9.0541E−015 |
| 208902 | T/S; LVX; | 5 | Other*; | T/S | 2.5755E−034 |
| | CP; TO; | | amino- | | |
| | GM | | glycoside; | | |
| | | | fluoro- | | |
| | | | quinolone | | |
| 208922 | T/S | 1 | Other* | T/S | 5.0329E−012 |

*((benzene derived)/sulfonamide)

TABLE 11
Statistically significant SNPs in gene
SCV20265_0968 (genbank protein accession number
YP_008979976.1) (headers as in Tables 3 and 4, respectively)

| | | | | best | |
|---|---|---|---|---|---|
| POS | drug | #drugs | drug class | drug | p-value |
| 1010720 | T/S; CP; | 3 | other*; | T/S | 1.0980E−013 |
| | TO | | amino- | | |
| | | | glycoside; | | |
| | | | fluoro- | | |
| | | | quinolone | | |
| 1010410 | T/S; LVX; | 5 | Other*; | T/S | 2.2190E−031 |
| | CP; TO; | | amino- | | |
| | GM | | glycoside; | | |
| | | | fluoro- | | |
| | | | quinolone | | |
| 1010771 | T/S; LVX; | 5 | Other*; | T/S | 1.3851E−017 |
| | CP; TO; | | amino- | | |
| | GM | | glycoside; | | |
| | | | fluoro- | | |
| | | | quinolone | | |
| 1009804 | T/S | 1 | other | T/S | 8.7922E−012 |
| | | | (benzene | | |
| | | | derived)/ | | |
| | | | sulfonamide | | |
| 1009933 | T/S; CP; | 6 | Other*; | T/S | 6.8812E−036 |
| | LVX; GM; | | amino- | | |
| | TO; CPE | | glycoside; | | |
| | | | fluoro- | | |
| | | | quinolone; | | |
| | | | Lactams | | |
| 1010434 | T/S; LVX; | 5 | other*; | T/S | 4.9203E−029 |
| | CP; TO; | | amino- | | |
| | GM | | glycoside; | | |
| | | | fluoro- | | |
| | | | quinolone | | |

*(tetracycline)

[0327] Similar results were obtained for other genes but are omitted for the sake of brevity.

[0328] Further, a synergistic effect of individual SNPs was demonstrated by exhaustively comparing significance levels for association of single SNPs with antibiotic susceptibility/resistance and significance levels for association of combinations of SNPs with antibiotic susceptibility/resistance. For a representative example of 2 SNPs the significance level for synergistic association of two SNPs was improved with the values given in Table 12 compared to the association of either SNP alone, given for exemplary different antibiotics.

TABLE 12
Synergistic increase for association of two SNPs

| drug | POS 1 | Ref | Alt | POS 2 | Ref | Alt | Improv [%] |
|---|---|---|---|---|---|---|---|
| CP | 5987559 | G | A, C | 1979239 | C | T, A | 663038409.7 |
| CP | 5965080 | T | A, G | 1979239 | C | T, A | 14738.1 |
| CP | 5954547 | C | T | 1979239 | C | T, A | 748.4 |
| CP | 5806684 | T | A | 1979239 | C | T, A | 748.4 |
| CP | 1521674 | C | T | 1979239 | C | T, A | 1320.2 |
| CP | 1537406 | G | A, T | 1979239 | C | T, A | 13902.1 |
| CP | 3881624 | C | T | 1979239 | C | T, A | 527.4 |
| CP | 6685845 | G | A | 1979239 | C | T, A | 1389.8 |
| CP | 1701758 | A | G | 1979239 | C | T, A | 2322.4 |
| CP | 1805165 | T | G | 1979239 | C | T, A | 377.4 |
| CP | 2567532 | G | C | 1979239 | C | T, A | 1145.7 |
| CP | 2611669 | C | T | 1979239 | C | T, A | 416.7 |
| CP | 1194383 | A | G | 1979239 | C | T, A | 197.0 |
| CP | 1899865 | C | T | 1979239 | C | T, A | 1161.1 |
| CP | 1947689 | A | G | 1979239 | C | T, A | 507.9 |
| CP | 5569783 | G | A | 1979239 | C | T, A | 1502.8 |
| CP | 1099519 | A | G, T | 1979239 | C | T, A | 336.6 |
| CP | 1009933 | C | G | 1979239 | C | T, A | 1145.7 |
| CP | 2317909 | C | T | 1979239 | C | T, A | 1249.0 |
| CP | 2316386 | C | G | 1979239 | C | T, A | 1389.8 |
| CP | 562872 | G | C | 1979239 | C | T, A | 1413.5 |
| CP | 1967346 | C | T | 1979239 | C | T, A | 20458.4 |
| CP | 1979239 | C | T, A | 5124971 | C | T | 321.6 |
| CP | 1979239 | C | T, A | 2530203 | C | T | 748.4 |
| CP | 1979239 | C | T, A | 6520799 | G | A | 1320.2 |
| CP | 1979239 | C | T, A | 6535290 | T | G | 194.1 |
| CP | 1979239 | C | T, A | 2350860 | C | A | 16315.3 |
| CP | 1979239 | C | T, A | 5662982 | G | A, C | 528.3 |
| CP | 1979239 | C | T, A | 2903129 | G | C | 154894.1 |

POS 1, 2 = position 1, 2 used for combination;
Ref = reference base;
Alt = alternated base in samples;
improv = improvement compared to minimum p-value of single SNP

[0329] For example, the improvement of 154894.1% in the last example with positions 1979239 and 2903129 for CP results from a p-value change from 9.24196e-146 to 5.96663e-149.

[0330] Again, similar results were obtained for other SNPs in respective genes.

[0331] A genetic test for the combined pathogen identification and antimicrobial susceptibility testing direct from the patient sample can reduce the time-to actionable result significantly from several days to hours, thereby enabling targeted treatment. Furthermore, this approach will not be restricted to central labs, but point of care devices can be developed that allow for respective tests. Such technology along with the present methods and computer program products could revolutionize the care, e.g. in intense care units or for admissions to hospitals in general. Furthermore, even applications like real time outbreak monitoring can be achieved using the present methods.

[0332] Instead of using only single variants, a combination of several variant positions can improve the prediction accuracy and further reduce false positive findings that are influenced by other factors.

[0333] Compared to approaches using MALDI-TOF MS, the present approach has the advantage that it covers almost the complete genome and thus enables us to identify the potential genomic sites that might be related to resistance. While MALDI-TOF MS can also be used to identify point mutations in bacterial proteins, this technology only detects a subset of proteins and of these not all are equally well covered. In addition, the identification and differentiation of certain related strains is not always feasible.

[0334] The present method allows computing a best breakpoint for the separation of isolates into resistant and susceptible groups.

[0335] The inventors designed a flexible software tool that allows to consider—besides the best breakpoints—also values defined by different guidelines (e.g. European and US guidelines), preparing for an application of the GAST in different countries.

[0336] The inventors demonstrate that the present approach is capa-ble of identifying mutations in genes that are already known as drug targets, as well as detecting potential new target sites.

[0337] The current approach enables
[0338] a. Identification and validation of markers for genetic identification and susceptibility/resistance testing within one diagnostic test
[0339] b. validation of known drug targets and modes of action
[0340] c. detection of potentially novel resistance mechanisms leading to putative novel target/secondary target genes for new therapies

1. A diagnostic method of determining an infection of a patient with Pseudomonas species potentially resistant to antimicrobial drug, e.g. antibiotic, treatment, comprising the steps of:
a) obtaining or providing a sample containing or suspected of containing at least one Pseudomonas species from the patient;
b) determining the presence of at least one mutation in at least two genes from the group of genes consisting of SCV20265_1892, SCV20265_5625, SCV20265_1467, SCV20265_5607, SCV20265_3294, SCV20265_1879, SCV20265_5242, SCV20265_2224, SCV20265_0530, SCV20265_3289, SCV20265_1858, SCV20265_2193, SCV20265_6274, SCV20265_2958, SCV20265_3248, SCV20265_1132, SCV20265_1451, SCV20265_6120, SCV20265_4839, SCV20265_2195, SCV20265_0968, SCV20265_2464, SCV20265_2518, SCV20265_2654, SCV20265_3101, SCV20265_3909, SCV20265_2610, SCV20265_1805, SCV20265_4445, SCV20265_2883, SCV20265_2916, SCV20265_1721, SCV20265_3099, SCV20265_1735, SCV20265_6289, SCV20265_2974, SCV20265_2404, SCV20265_6135, SCV20265_3626, SCV20265_1050, SCV20265_0188, SCV20265_5329, SCV20265_2792, SCV20265_1617, SCV20265_2236, SCV20265_0491, SCV20265_2422, SCV20265_5463, SCV20265_5597, and SCV20265_0241, wherein the presence of said at least two mutations is indicative of an infection with an antimicrobial drug, e.g. antibiotic, resistant Pseudomonas strain in said patient.

2. A method of selecting a treatment of a patient suffering from an infection with a potentially resistant Pseudomonas strain, comprising the steps of:
a) obtaining or providing a sample containing or suspected of containing at least one Pseudomonas species from the patient;
b) determining the presence of at least one mutation in at least two genes from the group of genes consisting of SCV20265_1892, SCV20265_5625, SCV20265_1467, SCV20265_5607, SCV20265_3294, SCV20265_1879, SCV20265_5242, SCV20265_2224, SCV20265_0530, SCV20265_3289, SCV20265_1858, SCV20265_2193, SCV20265_6274, SCV20265_2958, SCV20265_3248, SCV20265_1132, SCV20265_1451, SCV20265_6120, SCV20265_4839, SCV20265_2195, SCV20265_0968, SCV20265_2464, SCV20265_2518, SCV20265_2654, SCV20265_3101, SCV20265_3909, SCV20265_2610, SCV20265_1805, SCV20265_4445, SCV20265_2883, SCV20265_2916, SCV20265_1721, SCV20265_3099, SCV20265_1735, SCV20265_6289, SCV20265_2974, SCV20265_2404, SCV20265_6135, SCV20265_3626, SCV20265_1050, SCV20265_0188, SCV20265_5329, SCV20265_2792, SCV20265_1617, SCV20265_2236, SCV20265_0491, SCV20265_2422, SCV20265_5463, SCV20265_5597, and SCV20265_0241, wherein the presence of said at least two mutations is indicative of a resistance to one or more antimicrobial, e.g. antibiotic, drugs;
c) identifying said at least one or more antimicrobial, e.g. antibiotic, drugs; and
d) selecting one or more antimicrobial, e.g. antibiotic, drugs different from the ones identified in step c) and being suitable for the treatment of a Pseudomonas infection.

3. The method of one or more of the preceding claims, wherein at least a mutation in SCV20265_1892 and/or SCV20265_5625, particularly in positions 1979239 and/or 5987559, respectively, with regard to reference genome NC_023149 as annotated at the NCBI, is determined.

4. The method of one or more of the preceding claims, wherein the method involves determining the resistance of Pseudomonas to one or more antimicrobial, e.g. antibiotic, drugs.

5. The method of any one of claims 1 to 4, wherein the anti-microbial, e.g. antibiotic, drug is selected from lactam antibiotics and the presence of a mutation in the following genes is determined: SCV20265_1892, SCV20265_5625, SCV20265_1467, SCV20265_5607, SCV20265_1879, SCV20265_5242, SCV20265_2224, SCV20265_0530, SCV20265_3289, SCV20265_1858, SCV20265_2193, SCV20265_6274, SCV20265_2958, SCV20265_3248, SCV20265_1451, SCV20265_6120, SCV20265_4839, SCV20265_2195, SCV20265_0968, SCV20265_2464, SCV20265_2518, SCV20265_2654, SCV20265_3101, SCV20265_1805, SCV20265_4445, SCV20265_2883, SCV20265_1721, SCV20265_3099, SCV20265_1735, SCV20265_6289, SCV20265_2974, SCV20265_6135, SCV20265_3626, SCV20265_1050, SCV20265_5329, SCV20265_2792, and/or SCV20265_2236; and/or
the antimicrobial, e.g. antibiotic, drug is selected from quinolone antibiotics, e.g. fluoroquinolone antibiotics, and the presence of a mutation in the following genes is determined: SCV20265_1892, SCV20265_5625, SCV20265_1467, SCV20265_5607, SCV20265_3294, SCV20265_1879, SCV20265_5242, SCV20265_2224, SCV20265_0530, SCV20265_3289, SCV20265_1858, SCV20265_2193, SCV20265_6274, SCV20265_2958, SCV20265_3248, SCV20265_1132, SCV20265_1451, SCV20265_6120, SCV20265_4839, SCV20265_2195, SCV20265_0968, SCV20265_2464, SCV20265_2518, SCV20265_2654, SCV20265_3101, SCV20265_3909, SCV20265_2610, SCV20265_1805, SCV20265_4445, SCV20265_2883, SCV20265_2916, SCV20265_1721, SCV20265_3099, SCV20265_1735, SCV20265_6289, SCV20265_2974, SCV20265_2404, SCV20265_6135, SCV20265_3626, SCV20265_1050, SCV20265_0188, SCV20265_5329, SCV20265_2792, SCV20265_1617, SCV20265_2236, SCV20265_0491, SCV20265_2422, SCV20265_5463, SCV20265_5597, and/or SCV20265_0241; and/or
the antimicrobial, e.g. antibiotic, drug is selected from aminoglycoside antibiotics, and the presence of a mutation in the following genes is determined: SCV20265_1892, SCV20265_5625, SCV20265_1467, SCV20265_5607, SCV20265_3294, SCV20265_1879, SCV20265_5242, SCV20265_2224, SCV20265_0530, SCV20265_3289, SCV20265_1858, SCV20265_2193, SCV20265_6274, SCV20265_2958, SCV20265_3248, SCV20265_1132, SCV20265_1451, SCV20265_6120, SCV20265_4839, SCV20265_2195, SCV20265_0968, SCV20265_2464, SCV20265_2518, SCV20265_2654, SCV20265_3101, SCV20265_3909, SCV20265_2610, SCV20265_1805, SCV20265_4445, SCV20265_2883, SCV20265_2916, SCV20265_1721, SCV20265_3099, SCV20265_1735, SCV20265_6289, SCV20265_2974, SCV20265_2404, SCV20265_6135, SCV20265_3626, SCV20265_1050, SCV20265_0188, SCV20265_5329, SCV20265_2792, SCV20265_1617, SCV20265_2236, SCV20265_0491, SCV20265_2422, SCV20265_5463, SCV20265_5597, and/or SCV20265_0241; and/or
the antimicrobial, e.g. antibiotic, drug is selected from benzene derived/sulfonamide antibiotics, and the presence of a mutation in the following genes is determined: SCV20265_1892, SCV20265_5625, SCV20265_1467, SCV20265_5607, SCV20265_3294, SCV20265_1879, SCV20265_5242, SCV20265_2224, SCV20265_0530, SCV20265_3289, SCV20265_1858, SCV20265_2193, SCV20265_6274, SCV20265_2958, SCV20265_3248, SCV20265_1132, SCV20265_1451, SCV20265_6120, SCV20265_4839, SCV20265_2195, SCV20265_0968, SCV20265_2464, SCV20265_2518, SCV20265_2654, SCV20265_3101, SCV20265_3909, SCV20265_2610, SCV20265_1805, SCV20265_4445, SCV20265_2883, SCV20265_2916, SCV20265_1721, SCV20265_3099, SCV20265_1735, SCV20265_6289, SCV20265_2974, SCV20265_2404, SCV20265_6135, SCV20265_3626, SCV20265_1050, SCV20265_0188, SCV20265_5329, SCV20265_2792, SCV20265_1617, SCV20265_2236, SCV20265_0491, SCV20265_2422, SCV20265_5463, SCV20265_5597, and/or SCV20265_0241.

6. The method of one or more of the preceding claims, wherein the antimicrobial drug, e.g. antibiotic drug, is selected from the group consisting of Amoxicillin/K Clavulanate (AUG), Ampicillin (AM), Aztreonam (AZT), Cefazolin (CFZ), Cefepime (CPE), Cefotaxime (CFT), Ceftazidime (CAZ), Ceftriaxone (CAX), Cefuroxime (CRM), Cephalotin (CF), Ciprofloxacin (CP), Ertapenem (ETP), Gentamicin (GM), Imipenem (IMP), Levofloxacin (LVX), Meropenem (MER), Piperacillin/Tazobactam (P/T), Ampicillin/Sulbactam (A/S), Tetracycline (TE), Tobramycin (TO), and Trimethoprim/Sulfamethoxazole (T/S).

7. The method of any one of claims 1 to 6, wherein the antibiotic drug is T/S, CP, LVX, GM, and/or TO and a mutation in at least one of the following nucleotide positions is detected with regard to reference genome NC_023149: 1979239, 5987559, 1537406, 5965080, 3513162, 1967346, 5569783, 2350860, 562872, 3507580, 1947689, 2316386, 6685845, 3142437, 3468647, 1194383, 1521674, 6520799, 5124971, 2317909, 1009933, 2567532, 2611669, 2754829, 3301233, 4166792, 2709322, 1899865, 4712288, 3019764, 3068671, 1805165, 3299685, 1821163, 6702956, 3160788, 2515627, 6535290, 3881624, 1099519, 208902, 5662982, 2903129, 1701758, 2363393, 525701, 2530203, 5806684, 5954547, 261978, 2350862, 3507601, 3507667, 6519971; and/or
wherein the antibiotic drug is CPE and a mutation in at least one of the following nucleotide positions is detected with regard to reference genome NC_023149: 1979239, 5987559, 1537406, 5569783, 562872, 3507580, 1947689, 2316386, 6685845, 3142437, 3468647, 1521674, 6520799, 5124971, 2317909, 1009933, 2567532, 2611669, 2754829, 1899865, 4712288, 1805165, 1821163, 6702956, 3160788, 6535290, 3881624, 1099519, 5662982, 2903129, 2363393, 3507601, 3507667, 6519971; and/or
wherein the antibiotic drug is P/T and a mutation in at least one of the following nucleotide positions is detected with regard to reference genome NC_023149: 1979239, 5987559, 1537406, 5965080, 1967346, 2350860, 2754829, 3301233, 3019764, 6702956, 3881624; and/or
wherein the antibiotic drug is ETP and a mutation in at least one of the following nucleotide positions is detected with regard to reference genome NC_023149: 1979239, 5987559, 2754829, 3301233, 3299685, 1099519, 2350862; and/or
wherein the antibiotic drug is CFT, IMP, MER, CAX, AZT, and/or CAZ and a mutation in at least one of the following nucleotide positions is detected with regard to reference genome NC_023149: 1979239, 5987559.

8. The method of any one of claims 1 to 7, wherein the resistance of a bacterial microorganism belonging to the species Pseudomonas against 1, 2, 3, 4, 5, 6, 7, 8, 9, 10, 11, 12, 13, 14, 15 or 16, 17, 18, 19, 20 or 21 antibiotic drugs is determined.

9. The method of one or more of the preceding claims, wherein determining the nucleic acid sequence information or the presence of a mutation comprises determining a partial sequence or an entire sequence of the at least two genes.

10. The method of one or more of the preceding claims, wherein determining the nucleic acid sequence information or the presence of a mutation comprises determining a partial or entire sequence of the genome of the Pseudomonas species, wherein said partial or entire sequence of the genome comprises at least a partial sequence of said at least two genes.

11. The method of one or more of the preceding claims, wherein determining the nucleic acid sequence information or the presence of a mutation comprises using a next generation sequencing or high throughput sequencing method, preferably wherein a partial or entire genome sequence of the bacterial organism of Pseudomonas species is determined by using a next generation sequencing or high throughput sequencing method.

12. A method of determining an antimicrobial drug, e.g. antibiotic, resistance profile for bacterial microorganisms of Pseudomonas species, comprising:
obtaining or providing a first data set of gene sequences of a plurality of clinical isolates of Pseudomonas species;
providing a second data set of antimicrobial drug, e.g. antibiotic, resistance of the plurality of clinical isolates of Pseudomonas species;
aligning the gene sequences of the first data set to at least one, preferably one, reference genome of Pseudomonas, and/or assembling the gene sequence of the first data set, at least in part;
analyzing the gene sequences of the first data set for genetic variants to obtain a third data set of genetic variants;
correlating the third data set with the second data set and statistically analyzing the correlation; and
determining the genetic sites in the genome of Pseudomonas associated with antimicrobial drug, e.g. antibiotic, resistance.

13. A diagnostic method of determining an infection of a patient with Pseudomonas species potentially resistant to antimicrobial drug treatment, comprising the steps of:
a) obtaining or providing a sample containing or suspected of containing a bacterial microorganism belonging to the species Pseudomonas from the patient;
b) determining the presence of at least one mutation in at least one gene of the bacterial microorganism belonging to the species Pseudomonas as determined by the method of claim 12, wherein the presence of said at least one mutation is indicative of an infection with an anti-microbial drug resistant Pseudomonas strain in said patient.

14. A method of selecting a treatment of a patient suffering from an infection with a potentially resistant Pseudomonas strain, comprising the steps of:
a) obtaining or providing a sample containing or suspected of containing a bacterial microorganism belonging to the species Pseudomonas from the patient;
b) determining the presence of at least one mutation in at least one gene of the bacterial microorganism belonging to the species Pseudomonas as determined by the method of claim 12, wherein the presence of said at least one mutation is indicative of a resistance to one or more antimicrobial drugs;
c) identifying said at least one or more antimicrobial drugs; and
d) selecting one or more antimicrobial drugs different from the ones identified in step c) and being suitable for the treatment of a Pseudomonas infection.

15. A method of acquiring an antimicrobial drug, e.g. antibiotic, resistance profile for bacterial microorganisms of Pseudomonas species, comprising:
obtaining or providing a first data set of gene sequences of a clinical isolate of Pseudomonas species;
providing a second data set of antimicrobial drug, e.g. antibiotic, resistance of a plurality of clinical isolates of Pseudomonas species;
aligning the gene sequences of the first data set to at least one, preferably one, reference genome of Pseudomonas, and/or assembling the gene sequence of the first data set, at least in part;
analyzing the gene sequences of the first data set for genetic variants to obtain a third data set of genetic variants of the first data set;
correlating the third data set with the second data set and statistically analyzing the correlation; and
determining the genetic sites in the genome of Pseudomonas of the first data set associated with antimicrobial drug, e.g. antibiotic, resistance.

16. Computer program product comprising computer executable instructions which, when executed, perform a method according to any one of claims 12 to 15.

The application's sequence listing, which the Patent Office published only in electronic form, follows.

SEQUENCE LISTING (1 sequence)

SEQ ID NO: 1 - DNA, 6725183 bp, Pseudomonas aeruginosa SCV20265 (residues 1-1,681,296 of 6,725,183)
gtgtccgtggaactttggcagcagtgcgtggatcttctccgcgatgagctgccgtcccaacaattcaacacctggatccgtcccttgcaggtcgaagccgaaggcgacgaattgcgtgtgtatgcacccaaccgtttcgtcctcgattgggtgaacgagaaatacctcggtcggcttctggaactgctcggtgaacgcggcgagggtcagttgcccgcgctttccttattaataggcagcaagcgtagccgtacgccgcgcgccgccatcgtcccatcgcagacccacgtggctcccccgcctccggttgctccgccgccggcgccagtgcagccggtatcggccgcgcccgtggtggtgccacgtgaagagctgccgccagtgacgacggctcccagcgtgtcgagcgacccctacgagccggaagaacccagcatcgatccgctggccgccgccatgccggccggagccgcgcctgcggtacgcaccgagcgcaacgtccaggtcgaaggcgcgctgaagcacaccagctatctcaaccgtaccttcaccttcgagaacttcgtcgagggcaagtccaaccagttggcccgtgccgccgcctggcaggtggcggacaacctcaagcacggctacaacccgctgttcctctacggtggcgtcggtctgggcaagacccacctgatgcatgcggtgggcaaccacctgctgaagaagaacccgaacgccaaggtggtctacctgcattcggaacgtttcgtcgcggacatggtgaaggccttgcagctcaacgccatcaacgaattcaagcgcttctaccgctcggtggacgcactgttgatcgacgacatccagttcttcgcccgtaaggagcgctcccaggaggagttcttccacaccttcaatgcccttctcgaaggcggccagcaggtgatcctcaccagcgaccgctatccgaaggaaatcgaaggcctggaagagcggctgaaatcccgcttcggctggggcctgacggtggccgtcgagccgccggaactggaaacccgggtggcgatcctgatgaagaaggctgagcaggcgaagatcgagctgccgcacgatgcggccttcttcatcgcccagcgcatccgttccaacgtgcgcgaactggaaggtgcgctgaagcgggtgatcgcccactcgcacttcatgggccggccgatcaccatcgagctgattcgcgagtcgctgaaggacctgttggcccttcaggacaagctggtcagcatcgacaacatccagcgcaccgtcgccgagtactacaagatcaagatatccgatctgttgtccaagcggcgttcgcgctcggtggcgcgcccgcgccaggtggccatggcgctctccaaggagctgaccaaccacagcctgccggagatcggcgtggccttcggcggtcgggatcacaccacggtgttgcacgcctgtcgtaagatcgctcaacttagggaatccgacgcggatatccgcgaggactacaagaacctgctgcgtaccctgacaacctgacgcagcccacgaggcaagggactagaccatgcatttcaccattcaacgcgaagccctgttgaaaccgctgcaactggtcgccggcgtcgtggaacgccgccagacattgccggttctctccaacgtcctgctggtggtcgaaggccagcaactgtcgctgaccggcaccgacctcgaagtcgagctggttggtcgcgtggtactggaagatgccgccgaacccggcgagatcaccgtaccggcgcgcaagctgatggacatctgcaagagcctgccgaacgacgtgctgatcgacatccgtgtcgaagagcagaaacttctggtgaaggccgggcgtagccgcttcaccctgtccaccctgccggccaacgatttccccaccgtagaggaaggtcccggctcgctgaacttcagcattgcccagagcaagctgcgtcgcctgatcgaccgcaccagcttcgccatggcccagcaggacgtgcgttactacctcaacggcatgctgctggaagtgaacggcggcaccctgcgctccgtcgccaccgacggccaccgactggccatgtgctcgctggatgcgcagatcccgtcgcaggaccgccaccaggtgatcgtgccgcgcaaaggcatcctcgaactggctcgtctgctcaccgagcaggacggcgaagtcggcatcgtcctgggccagcaccatatccgtgccaccactggcgaattcaccttcacttcgaagctggtggacggcaagttcccggactacgaacgcgtactgccgcgcggtggcgacaagctggtggtcggtgaccgccagcaactgcgcgaagccttcagccgtaccgcgatcctctccaacgagaagtaccgcggcattcgcctgcagctttccaacggtttgctgaaaatccaggcgaacaacccggagcaggaagaggccgaggaagaagtgcaggtcgagtacaacggcggcaacctggagatcggcttcaacgtcagttacctgctcgacgtgctgggtgtgatcggtaccgagcaggtccgcttcatcctttccgattccaacagcagcgccctggtccacgaggccgacaatgacgattctgcctatgtcgtcatgccgatgcgcctctaaacatactgaatgtccctgacccgcgtttcggtcaccgcggtgcgcaacctgcacccggtgaccctctccccctccccccgcatcaacatcctctacggcgataatggcagcggcaagaccagcgtgctcgaagccatccacctgctgggcctggcgcgttcattccgcagtgcgcgcttgcagccggtgatccagtacgaggaagcggcctgcaccgtattcggccaggtgatgttggccaacggcatcgccagcaacctggggatttcccgtgaacgccagggcgagttcaccattcgcatcgatgggcagaacgcccgaagtgcggctcaattagcggaaacacttccactgcaactgatcaacccggacagctttcggttgctcgagggagcgccgaagatccgccgacagttcctcgattggggagtgttccacgtggaacctcggtttctgcccgtctggcagcgcctgcagaaggcgctgcgccagcggaactcctggctccggcatggtaaactggaccccgcgtcgcaagcggcctgggaccgggaattgagcctggccagcgatgagatcgatgcctaccgcagaagctatatccaggcgttgaaaccggtattcgaggaaaccctcgccgaattggtttcactggatgacctgacccttagctactaccgaggctgggacaaggaccgggacctcctggaggttctggcttccagcctgttgcgcgaccagcagatgggccacacccaggcgggaccgcagcgtgcggatcttcgcatacggttggcaggtcataacgccgcggagattctctcgcgcggtcagcagaagctggtggtatgcgccctgcgcatcgcccaaggccatctgatcaatcgcgccaagcgcggacagtgcgtctacctggtggacgacctgccctcggaactggatgagcagcatcgaatggctctttgccgcttgcttgaagatttgggttgccaggtattcatcacctgcgtggacccgcaactattgaaagacggctggcgcacggatacgccggtatccatgttccacgtggaacatggaaaagtctctcagaccacgaccatcgggagtgaagcatgagcgagaacaacacgtacgactcttccagcatcaaggtgctgaaggggctggatgccgtacgcaagcgccccggcatgtacatcggcgacaccgacgatggcaccggtctgcaccacatggtgttcgaggtggtggataactccatcgacgaagcgctggccggttactgcagcgaaatcagcatcaccatccatacggatgagtcgatcactgtccgcgacaatggacgcggtattccggtggatatccacaaggaagaaggggtttctgcggcggaagtgatcatgaccgtcctccacgccggcggcaagttcgacgacaacacctacaaggtgtccggcggcttgcacggtgtgggcgtctcggtggtgaacgcgctgtcccatgaactacgcctgaccatccgtcgccacaacaaggtctgggaacaggtctaccaccacggcgttccgcagttcccactgcgcgaagtgggcgagaccgatggctccggcaccgaagttcacttcaagccgtccccggagaccttcagcaacatccacttcagttgggacatcctggccaagcgcatccgcgagctgtccttcctcaactccggcgtcggcatcctgctgcgcgacgagcgtaccggcaaggaggagctgttcaagtacgaaggcggtctgaaggccttcgtcgagtacctgaacaccaacaagaccgcggtgaacgaggtattccacttcaacgtccagcgtgaagaggacggcgtgggtgtggaagtcgccttgcagtggaacgacagcttcaacgagaacctgctctgcttcaccaacaacatcccgcagcgtgacggcggcacccacctggccggtttccgttcggcgctgacgcgtaacctgaacaactacatcgaggccgaaggcctggcgaagaagttcaagatcgccaccaccggcgacgatgcccgcgaaggcctcaccgcgatcatctcggtgaaggtaccggacccgaagttcagctcgcagaccaaggacaagctggtctcctccgaggtgaagactgcggtggaacaggagatgggcaagtacttcgccgacttcctgctggagaatcccaacgaagccaaggccgtggtcggcaagatgatcgacgccgcccgtgcccgcgaggccgcgcgcaaggcgcgcgagatgacccgccgcaagggcgcgctggacatcgccggcctgcccggcaaactggccgattgccaggaaaaggacccggcgctctccgaactgtacatcgtggagggtgactccgcgggcggttccgccaagcagggccgcaatcgccggacccaggcgatcctgccgctcaagggcaagatcctcaacgtcgagaaggcgcgcttcgacaagatgctctcctcccaggaggtcggtacgctgatcaccgccctgggctgtggcatcggccgcgaggaatacaacatcgacaagctgcgctaccacaacatcatcatcatgaccgatgctgacgtcgacggttcgcacatccgcaccctgctgttgaccttcttcttccgccagatgcccgagctgatcgagcgtggctacatctacatcgcccagcccccgttgtacaaggtcaagcgcggcaagcaggagcagtacatcaaggacgaccaggccatggaagagtacatgacccagtcggccctggaagacgccagcctgcacgtcaacgagcacgctccgggcctgtccggggcggcgctggagaaactggtcaacgagtatcgcggggtgatcgccaccctcaagcgcctgtcgcgcctgtacccccaggagctgaccgagcacttcatctacctgcctaccgtgtcggtggacgacctggctaacgagtcggccatgcagggctggttggagaagttccaggcgcgcctgaccgccgccgagaagtccggcctgacctacaaggccagcctgcgcgaagaccgcgagcgccacctgtggctgcccgaggtggaactggtggcccacggcctgtccagctacgtcaccttcaaccgtgacttcttcgccagcaatgactaccgctcggtgtcgctgctcggcgaccagctgaacagcctgctggaagacggcgcctacgtgcagaagggtgagcgcaagcgcccgatcagcgccttcaaggacggtctggactggctgatggccgaaggtaccaagcgccacagcatccagcgatacaaggggctgggcgagatgaaccctgagcagctgtgggaaaccaccatggatccgaacgtccggcgcatgctcaaggtgaccatcgaggacgccatcgccgccgaccagatcttcaacaccctgatgggcgatgccgtggagccgcgccgcgacttcatcgaaagcaacgcgctggcggtgtcgaacctggacgtgtgacgggtcggcagaccgaccctcatggaaaccccggcctggcgccgggggtttctttttgcgccaggtagcctggatatgtgccttgccaaggtgtggccgagccccggttgctcgccagcattggcaccctggacccaagcctcctggcggcgtggcaccgcttctgtgggcagcggtcgccggtcggttcggtcgatcgtttccagccggccttgctttgcgcctcgcgtgaaaacaagaagccccgctatggcggggcttcttttatcgaatcggcgcacagtgcgccttgcagggggctttgcggcccttcacgagaccaccgacggctccggatggctgacccgctgctggatggggctgatctcggccatggtctcgctgacccaggcttcggcgcgctggtttagctcggcgatggcgcgcgggccttcgccttcggcgtgcatggccgggccgatcaccacctggatggtgcccgggtacttggcccagccggccttgggccaatactgcccggcgttgtgggcgatcggcagtaccggtagcccggcgttgaccgccagggcggtgccgccgcgggagaacttgcccatctgccccaccggaatacgcgtgccttccgggaagatcagcacccaggcgcctttcttcaggcactcgtcgccctgcttggccagttgcttgagggccagcttgggctggctgcggtcgatggcgatgggcttgagcagggccagggcccagccgaagaacggcacgtagagcagctcgcgcttgagtacctggctgagtggctcgaagaagccggagaggaagaaggtttcccaggtgctctggtgcttggagaggatcacgcagggcttttccgggatgttctccagtccgcgcacctcgtagcggatgccggcgaccacgcgggtcagccagatcgcgaagcggcaccagttctgtaccacgaagcggtagcgggcgcggaacggcaggatcggcgcgatgaagaagctgagggtgccccagacgaacgcgctggcggacagcagcaggtaaaagaggacggttctgatggcctgcactgtcgacatgtattctgaccttactgaagtaatgcgctggcgactgccgccagatcgtcgaatatcagggtgccctctggcaagggcttgcccagcgtacgtacaccttttccggtctttaccaataccggctgacaatcgacggcccgcgccgcctccaggtcaccgatgctgtcgccgacgaaccagatacccgacagatcgaccccgtagtgctcgccgatctgccgcagcatacccggcttcggcttgcggcagtcgcaaccgtcgtccggtccatgcggacaatagacgatgaggccgacctcgccgccctgctccgcgaccagttcgcgcaagcgcgcatgcatggcctcgagcactgccaggtcgtaatagccacgggcgatgccggactggttggtagccaccgcgacggtccagccggcctggctcaggcgggcgatggcctcgatcgagctggggatggggatccactcgtcgagggtcttgatgtaatcgtcggagtcgaggttgatgactccatcgcggtcgagaatcagcagggaacgggacatcgatgcgcagttggccatgaacggaaaggatcgattctacctcagccagccggagcatcgcggatggatcgacgagccccctacgctggacaatctgtactagattcaataatggcaatggaatggcaatcccaggccagggagtcatttggcacgcagcagtgggtgtctcggagtacgtgcgaaccccttggcgggtggatcaccggagtaacgcagtaagcgcctatcgcatgccagcacggccgaccggccgtgtttccaccacaggtggagcgggcatgacgacggggagttccggggcgtctgcccgttcccaaggacggtaaccgtgaaacgcctgaaaaagacactgcacctttcaagcttgtccctcgcttccctggctctttcttccgccgccctggcggccgctccggtcatgctcgaccagggcaaggaatggaccgaaagccaccgccaggacttctacagccgcgaccagggctcgcaggtgatgcccctgccctggctcaaggcgttgcgacagccggatggaacgcctttcctcgccgacagcctggcccgctacggctatttgcccaaccccaaggcgcccgcggaaggcctgccggtgggcttcaccgtagccggcacgggcgcccggcagatggtcggcatgacctgttcggcctgccatacccggcagatcgaggtgaagggcactgcctatcggatcgacggcggtccggcgatcgtcgacttccaggcattcctcgccgacctcgatcggtccgtgggaccgctgaccagcgatgacgccgccttcgacgccttcgccaagcagatcctcggggccaatccgcctcccggtgcgcgcgacgctctgctcgcggcggtgaaggaatggtacgagccctatcacacgctgatcgagcgcgcgctgcccaaggacacctggggaccggcgcggctggacgcggtatcgatgatcttcaaccgccttaccgggctggatatcggcaccgcgccgccctacctgattcccgacaacatcaaggcggcggatgcgccggtgcgctatccgttcctgtggaacgcggcgcggcagaacaagacccagtggcccggcttcgccgccaacggcaacgacctgctcggcctggcgcgcaatgtcggcgaggtctacggggtgttcgccaccttccacccgcagaagagcaagttccacctgctgggcatggactacctgaagatcaactcggccaacttccacggtctgggcaagctggaagacctgatcaagaagatcggcccgccgaagtggccctgggcggtggacaagcacctggccaggaaaggcgcgctgatcttcgcccgcaagaccgacgaaggtggctgcgtggagtgccacggcatccggatcaaggacctggtgctttgggacactccgctgagggacgtcggcagcgacagccgccagcacgccatcctcgatggccaggtgcagaccggcgtgatggagggcgcgcggatgccgttcggccagccgctgaaggcgaccgacggagccttcgatgtactcgccgtagcggtggccggttcgatcctgcagcacttcgtgccgatcctcggtgagaagcacgatgccaaggcggcggcggtcaagccggaaagcgtgatgaccgacgaaacccggcaactgctgaccgccttccagaagccggtgcgtacccaggccgacccctacccctacgagtcgcgggtcctgcaggggatctgggcggcggcgccgtacctgcacaacggctcggtgccgaccctggaagagttgctgaagccggccgcggagcgggtggaatccttcccggtgggctcggcctacgacgtggacaaggtcggcctcgccgcccagcagacccaattcggcagctatgtgctgaagaccaccggctgcgagcagcgtgattccggcaacagccgctgcggccatgagtacggcaccagcctgtcggccgaggagaagcgtgcgctgctggagtatctgaaggtcctgtagtgaaaaaggcccggtgtcgcgaggacgccgggccttttcttcgaggcgggactggctcagccgagcagcgagatgtccgccaccccgaggaacgacccgcgcagcttggccagcagcgcatagcggttggcgcgcaccgccgcgtcgtcgacattgaccatcacatcggcgaagaacgtatccaccggctcgcgcaaggccgccaggcgggccagcgcggcgcgatagtcgcgtgccgctgccagcggcgcgacttcgctttcggcgttcgccacggcgctgcccagggccttctcggcggcttccaccagcaggctggcatccacgttcggcggaacctcgtcctcggacttggtgagaatattcgacacccgtttgttcgccgcggccagggcctcggcttcaggcaactggcggaaggcctggacggcctgtacgcgctggtcgaagtccagcggcgagcttggcttgagcgcgcgcaccgactggtacacggccacgtccacgccttcgtcctcgtagcgcgcgcgcaggcggtcgaacacgaagtccagcacctgctcggccaggccggcggccttgaccttgtcgccgtattgctcgacggcggcgttgaccgcggctaccaggtccaggtcgagctgcttctcgatgaggatgcgcagcacgcccagcgcagcgcggcgcagcgcgtaggggtccttgctgccggtgggaagcatgccgatgccgaagataccgaccagggtatcgagcttgtcggccaccgccacggcggcgccggtcagggtcgagggtagctcggcgccggcgccgcgcggcatgtactgctcgttgagggccagggcgacgtcttccgcttcgccgccgtgggtggcgtagtagtagccggcgatgccctgcatttcggggaactcgccgaccatctcggtcgccaggtcacacttggacaggatgccggcgcgcgcggcgttctgcgcattgccgcctatacgttcggcgatgtaggcggccaggccggagacgcgctgggccttctcgaacacggtgccgagctgggcctggaacactacgttgcgcaggcgctcattgaagctttcgagcggctgcttcttgtcctgcttgaagaagaactcggcgtcggtgaggcgcgggcgaaccaccttctcgttaccgctgacgatgttctccggcgccttgctctcgacgttggcgacggtgatgaagcgcggcagcagcttgccgttggcgtccagcaggcagaagtatttctggttgtcctgcatggtggtgatcagggcttcctgcgggacctcgaggaagcgctcctcgaaggagcagaccagcggcaccggccactcgaccagtgcagtcacttcgtcgagcaggctcggcggcacgatggcgctgccctgttgctcggcggccagttcggccacgcgcttggcgatcagctcgcggcgctcggcgaaatcggccagcacatgagcgccgcgcaggtcttccagatacgctgccgggctggaaatacgcacattgtccggattgtggaagcggtggccacgggattcgcgcccggctttctgggcgaggatctcgcactcgaccacatcgtcgccgaacagcatcaccagccattgggtcggacgcacgaactcctcgcggcgagctgcccagcgcatccgcttgggaatcggcagttcgttcaacgaggcctcgacgatgccaggcagcaggccggcggccggttggccggcgatagtctggctgaagcgcagcttcggaccgctcttgtcgatctgctgcagatccacgccgcacttcttggcgaagcccagggcggcctgggtcgggttaccgctggcgtcgaaggcggcctgtagcggcggaccgtctaggttgacggtacggtcgggctgctgcacggcgagttgctcgaccagcacggcgagacggcgcggcgccgcatagaaacgcgcagcggcatagctcagaccggcagccttgaggcccttctcgataccgctgaggaaggcttcgccgaggctgttgagggcttttggcggcagctcttcggtgcccagttcgaccaggaaatccttggcgctcatcattcggcctccttcagcttggccagtacttcgtcacgcaattcgggggtggccatggggaagccgaggcgcgcgcgggcctgcaggtagctctgcgccacggcgcgggccagggtacgcacgcgaaggatgtagcgctggcgctcggtgaccgagatggcgcgccgcgcatccagcaggttgaaggtatgcgaagccttgaggaccatctcgtaggtcggcaacggcagctccagcgcgatcaggcggttggcttcgctttcgtagaagtcgaacagttcgaacagcttcggcacgttggcgtgctcgaagttgaaagtggattgctccacctcgttctggtggaacacgtcgccataggtgaccttgccgaacgggccgtcggtccagaccaggtcgtagaccgagtccacgccctgcaggtacatggccaggcgctccaggccgtaggtgatctcgccggtgaccggatagcactcgatgccgccgacctgctggaagtaggtgaactgggtgacttccatgccgttcagccagatttcccaacccaggccccaggcgccgagggtcggcgactcccagttgtcctcgacgaagcggatgtcgtggaccagcgggtcgatgccgatggctttcagcgagccgaggtacagctcctggaagttctccgggttcggcttcaggactacctgaaactggtagtagtgctgcaggcggttggggttctcgccgtagcgaccgtcggtggggcggcggctcggctggacgtaggcggcgttccaggtctccgggccgatggcgcggaggaaggtggcggtgtggaaggtgccggcgcccacttccatgtcgtagggctgcagcaccacgcagccctgctcggcccagtagttctgcagggcgagaatcaggtcttggaaggtgcgcacggcgggcgtagtctggctcacgaaattcacctgtgctgaggcttcgatacaaaacgcggaagtatacccgattcccgcgccgcctcgcccgtccccccgatccctggaaaaccacggaaagccttatgccacgctgcttctggtgcaacgacgatcccctctacatggcctaccacgatgaggagtggggtgtgccgcagcgcgatcccgacgcgctgttcgaacttctgctgctggagggcttccaggccgggttgtcctggatcaccgtgctgaagaagcgcgagcgctaccgcgaggtgctgttcggcttcgacgtgcagcgggtggcacagatgagcgacgcggagatcgacgaactgatgctcgaccccggcatcattcgcaatcgggccaagctcaacgctgcgcggcagaacgcccaggcctggctggagctggatgacccggctgggttcctctggtccttcgtcggcggccagccgaagatcaaccatttcgctggtcgcgccgaggtgccggcgattaccccggaagccgaggccatgagcaaggcgctgcgcaaggccggcttcaacttcgtcgggccgaccatctgctacgccttcatgcaggccagcggcatggtcatggaccatacccaggactgcgaccgttacgcccaactcgtcggctagccgggcgctccctgacggatgcgttcggatgttccacgtggaacatcggcgcgcagcatagctggtcgccccgcttccttggctgccgccctcgccttcttcctggcgtacaatgcgcgttcgagtcgagcgaggagtgtttcgtggagaaattcaaaggtgccctggtggtgggggccctacgcctgttcgcgttattgccctggcgtgccgtgcaaggcgtcggggccggcataggctggctgatgtggaaattgccgaatcgatcccgcgaggtagtgcggatcaacctgtccaagtgcttccccgagttgtctgaaaccgaactggaaaagctggtcggacaaagcctgatggatattggccggaccctcaccgaaagtgcctgcgcctggatctggccgcctgaaaagtcgctgagatacatccgcgaggtcgaaggcatggaggtgctggaggaagcgctggcttccggcgatggtctggtcggcattaccagtcacctgggaaactgggaagtactcaaccacttctattgttcctacgccaagccgatcatcttctatcgtccgcccaagctgaaggcagtcgacgaattgctgaagaagcaacgcgtgcaattgggcaaccgcgtcgcaccttccactccggagggtatcctcagcgtcatcaaggaagtgaagaaaggcggttgcgtaggaattcccgccgaccccgagcccgcgcgtaccgctgggctcttcgtgccttacctgggcaccactgcattgatcagcaagttcgtcccgcagttgctttcacgcggcaaggcgcgtggagtgttcttccatgcggtgcgcctgcccgatggtagcggttacaaggtgatcctcgaagcggctccggcggacatgtacgacaaggacctggaagtgtctgtagcagccatgagccgcgagttggcgaagtatgtacgagcctatcccagccagtacatgtggagcatgaaacgcttcaagaaccgcccggatggcgagaaaaaatggtactgaggaaagggcgtcggaagacgcctttttcatatccgggtactatgctcagctctgccgcctcctccgcaggtcccgagggactcgatggataatcaacgacaatacccacgaaccccgctcaagtgccgaatccgtatcagtcacccgctatttggcgagctgatggcgcagacacgcgacctgtccgacaccggggtctatgtcaaacacccggagctgacccagctcccaacaggcagtgtcgttactggccaggtacaggacttgccgatcgacgcgccgatcctgcagatggaagtcgtgcgagtcgatgcggaaggcgtcggcctgcgctttctcagcgaagcgtgaacggtggtgttccacgtggaaccccaggcatgagccactgatcacagagtgggcgaaaccgctgccggttatcggctagaatgcgcgccgctcggcatggtgccgggcatgggttccctcaccccatcgcgcaaaaaggacagtacatgtcagcctcttctccggcggcctggcgcggcaccctggccggcctgatcgccttccacatcttcatcatcatcgccagcaactacctggtgcagttgccgatcaccctgtttggctggcacaccacctggggcgccttcagctttccgttcatcttcctggctaccgacctcaccgtgcgcctgctgggcaagggccctgcccggctggtcatcgcccgggtcatgatcccggcgttgatcgcctcctacgtagtctcagtgttattccaggaagcggcgttccgtggtttctctgcgctgctcgagttcaacaccttcgtcgcccggatctccctggcaagcttcctcgcctatgtgctcggacagatcctcgatatccaggtattcgaccgcctccgtcgttcccggcactggtggaccgcgccagtcgcctcgaccatcctcggcaacctgctggacaccttcaccttcttcttcgtggcgttctggcgtagcgacaatccgttcatggcgcagcactgggtggaaatcgccacggtggactacggagtgaagctgagtatcagtcttttactgttcgtgccgctctacggcatgctactcaacggcatcctgaagatgctgccggggcggccgcagagcaacgcttgaggctcatcgaggcaatctggaggaagggcgcaacaggccgtgatgaccgttgcgcccttcttcgttcaggaggtggtagcccggtgcgcggccgtgagcagcgtcagggcatcgccgccgagcgtgaccaggatgtgcgccacgcgctgaatgggaacgccctgccccgtccgcacttcgatcctttccaaggcatggaggaggccgaggagagccctgaggcgctcctgtacggattcgagcatctcattggcggaggcgttccggtgaacgtagagaatcgcttgctcgtatgggtattcgacataggacgggactgaacgctcttgcttcgacatgttggctccggaaaagtagttgaagtcaggtgtcgcgttcgggcttggaccgaagcgatgagtcgaagctagagggccggcagcggtcgctcaatggggtgttgggcgttcgggatgcaggctacatcgttgacagaagttgcctacgaatgtgtggaacaggtctttgtaaaagtgtcgtcggggcgtgctcgaaccgttctgccagcgctcgatgagcacgcccgacccgtctgccggaactccggccggcgggtggcgagaacgcgctgcgcaagccttggccggacgctcaggttctcgccctgtcgagcttgcgcaggagcaccgtcatttccttttcggcctgcttgtcgccatgcgtcgcggcagttgccaggccctgctcccaggcctgccgggcgcccgcgagatcgccggcagcctggcgcgccttgcccagcagtttccagccggcggaatacttcgggtcctgctctacgcagcgctggaggtgttccgccgcgcgttcggcgtcgcccgcgtccaggcagcccttgcccaggccgaagcgcagcagcgcattgtccacgcctttggccagcatcttttccagaccttcgatcatcatcctgccctcttccaacgatgtcggccattgtgcccggctccggccaggctttgcacggaacagggggattcgaccgttgcgaaggaggcacgcggccccttggtgttcgtaggccgaagccctatcgccgttcgcgatagggcgtgcctcagaagaacgtcaggccggcctggaacagtcgctcgacgtcgcggatgtatttcttgtcgaccaggaacagcagcacgtggtcgccgctctcgatgcgggtgtcgccatgggcgatcagcacttcctcgtcgcgcaccagcgcgccgatggtggtgcccggcggcagcttgatctcgttgatcgagcgaccgatcaccttgctcgacttggcgtcgccatgggctaccacttcgatcgcttcggctgcgccgcggcgcagcgagtgtacgctctcgatgtcgccgcggcgaacgtgggccagcagggtgccgatggtcgccagttgcgggctgatggcgatgtcgatctcgccgccttgcaccaggtcgacataggcagggttgttgatcagggtcatcaccttgctcgcgccgagccgcttggccagcagcgaggacatgatgttggcctcgtcgtcgttggtcagggcgaggaacacgtcggtctcgccgatgttttcctccagcagcaggtcgcggtcggaagcgctgccgttgagcacgatggtgctgtccagggtatccgagaggtgccggcagcgcagcgggctgcgctcgatgatctttacctggtagcggctctcgatggcctcggccaggcgctcgccgacattgccgccgccggcgatgatgatccgcttgtagctgtcgtcgagcctgcgcatctcgcccattaccgcgcggatatgggccttggcggcgatgaagaagacttcgtcgtcggcctcgatcaccgtgtcgccctggggaatgatcggccggttgcggcggtagatcgcggcgacgcgggtatccacgttcggcatgtgctcgcgcagctggcgcagctcctgccctaccagagggccgccgtagtaggccttgatcccgaccaactgcgccttgccctcggcgaagtcgatgacttgcagcgcgccggggtgttcgatcaggcgcttgatgtagttggtgaccacctgctccgggctgatcagcacgtccaccgggatcgcctcgttgtcgaacagcccggtacgggtcaggtaggccggctcgcggacgcgggcgatcttggtcggggtgttgaacagggtgtaggcgacctggcaggcgaccatgttggtctcgtcgctattggtcaccgccaccagcatgtcggcgtcgtcggcgccggcctggcgcagcaccgtggggaacgaggccttgccttgcacggtgcggatgtcgaggcggtcgccgaggtcgcgcaggcggtcgccgtcggtgtcgaccacggtgatgtcgttggcttcgctggccaggtgctcggccagtgtgccgccgacctggccggcaccgaggatgatgattttcatggcaggaaacggctcgtcaggtttcgatcaacgggcggatatcttgatcagcttggcatagtagaagccatcgtggccctccacctgcggcagcaactggcggccgtggggctgtttcatgccccaggggccgggaaggtccagttcgcgggcgccgggcgtacgggcgaggaaggcggcgatgctgtcgctgttttccgccggcatcaccgaacaggtggcatagagcagcacgccgccgacttccagggtaggccacagtgcgtcgagcaattcaccttgcaggtgcgccagggcggcgatgtcttccggcttgcgcgccagcttgatgtccgggtggcggcggatcaccccggtggccgagcacggcgcgtcgaggaggatgcgctggaacggcttgccgtcccaccactccccggtggccctggcgtcggcggcgaccaggctggcttgcaggccgagccgctggaggttttcccgaacccttaccaggcggctctcctcgaggtcgacggcgaccacttcggccagtcccggctgggtttccagcaggtggcaggtcttgccgccaggcgcacagcaggcgtcgaggacacgctggccgggcgcgctttcgagcagctcggcggccagttgcgcggcttcgtcctggacgctgacgcggccctccgcgaagcccggtagttcgcgtacgtcgcgcggcgcggcgagctggatgccgtcgcggctgtagtcgcaggcgcgggcctcgatcccggcttcggcgagttcggccaggtaggcatcgcgctcgccgtggcgccgattgacccgcaaggtcatcggcgggtgtgcgttgttcgccgcgcagagcgcgtcgagttgctccggccaggcctgcttgagcgctttcagcagccagcgcggatggcccaggcgcgccgagggatcgcggtcgacctcggccagcagcgtctcgccttcgcgctgcgcgcggcgcagcacggcgttgagcacgcccttggcccagcccttcttcagcttgtcggcgcagccgacggtctcgccgatcgcggcgtgcggcggaatccgcgtgtagagcaactggtagaggccgatcagcagcagggcgtggatatcggtgtcggcggccttgaacggcttctgcaacaggcgcgcggccagggcctgcaggcgcggttgccagcgcgccgcgccgaaggccagctcctgggtcaggccgcgatcgcgcggggcgaccttgtccagttgcggcggcaacgcgccagacagcgaggcgcgtccggcgagcaccgcggccagcgcctggcaggcggcgagacgcgggttcattggccgagcacctggccggtggcgaattgctcgcgacggctgttgtagaggtcggcgaaggccagtggcttgccgcccggcacttgcaggcgggtcaggcgcagggcgccttcgccgcaggcgaccagcaggccgtcgcggctggcctcaaggatggttccgggcgccccgctgccctgccccaggctggcaccgaggactttcagcggcgcatcggcgaggctggtgtggcagaccggccagggggtgaaggcgcggacctggcgctccagttcgacggccggacggctccagtcgaggcgtgcctcgtccttgttcagcttgtgcgcgtaggtggccagggcgtcgtcctggatctcgccatgcagggtgccggcggccaggccggcgatggcttcgaccaccgctttcgggccgagcgcggcgagccggtcgtgcaggctgccgccggtgtccgcggcggaaatcggcgtgctcaccttgagcagcatcgggccggtgtcgagccctgcttccatctgcatcacggtgacgccgctctccgcgtcgccggcttccaccgcgcgctggatcggcgcggcgccgcgccagcgcggcagcagcgaggcgtggctgttgatgcagcccaggcgcgggatatcgagtaccgcctggggcaggatcaggccataggcgaccaccaccatcaggtccgcgcgcagggccgccagctccgcctgggcctcggcattgcgcaggctctgcggctgcatgaccggcaggccatgctccagggccaggctcttcaccgcgctgggcatcagtttctgcccgcggccggccggccggtcgggctgggtgtagacggcgacgatccgatgtggggtgtcgagcagggccttgagatgctcggcggcgaattccggggttccggcgaagacgatgcgcaatgcttggctcatgcggggctcgctaaaagaaaaaggcttgccggggcaagcctttgggggatggggtcacgcctgctgtcgatgctgcttttccagcttcttgcggatgcggtcgcgcttgagggtggacaggtagtcgacgaacagcttgccgttgaggtggtcgcattcgtgctggatgcataccgccagcaggccttcggcgacttcctcgaaggggttgccatcgcggtcgagggccttgatccggaccttctgcggtcggtccacgttctcgtagaagccgggtaccgacaggcagccttcctggtactggtccatatcctcggtcagcggttcgaactcggggttgatgaataccctcggctcggacttgtcttcgctgaggtccatgaccacgatgcgcttgtgcacgttcacctgggtcgcggcgaggccgatgcccggggcttcgtacatggtttcgaacatgtcgtcgatcagctggcgcaccgcgtcgtcgaccacctccaccggtttggcgatggtccgcaggcgcggatcggggaattcgagaatgttcaggatggccatatgcgtttgtgatgcacttgtggaatcgattgaaaatccgctgctaagatggcgcgcagcttgaaaacggcttcagaccgcgattctcgcgggcttcgggcgtttcgcgtatgtcgacatgataaagggattcactgcatgaggaaatcactagtcgcccttctgctccttgccgcgagcggtctggcgcaggcccaggtcgacctcagggaagggcatccggaccgctacacggtggtcaggggcgataccctgtgggacatctcggggaaattcctccgccagccatggaagtggccggaactctggcacgccaacccgcagatccagaatccccacctgatctaccccggcgacacactcagcctggtctacgtcgatggccagccgcgcctggtgctgaaccgtggcgaatcgcgcgggaccatcaagctgtcgccgaagatccgcagcacgccgatcgccgaggccatcccgaccatcccgctggacaagatcaacagcttcctgctggccaaccgcatcgtcgatgacgagaagaccttcaccagtgcgccgtacatcgtcgccggcaacgccgagcggatcgtcagcggcaccggcgaccgcatctatgcccgcggcaagttcgccgacggccagccggcctatggcatcttccgccagggcaaggtctacatcgatccgaagaccaaggaagtcctcggcatcaacgccgacgacatcggcggcggcgaggtggtggccaccgaaggcgacgtcgcgaccctggcgctgacccgcaccacccaggaagtgcgcctgggcgaccgcctgttccccaccgaggagcgtgcggtgaattccaccttcatgcccggcgagccgagccgcgaggtgaagggcgaaatcatcgacgtaccgcgcggcgtgacccagatcggccagttcgacgtggtcaccctgaaccgtggccagcgcgacgggctggccgagggcaacgtgctggcgatctacaaggtcggcgagacggtgcgcgaccgcgttaccggtgagtcggtgaagattcccgacgaacgcgccggcctgctgatggtgttccgtacctacaagaagctgagctacgccctggttctgatggccagcaggccgctctcggtaaccgacagggtgcagaatccctgactcgaaacccccgcctcggcgggggtttcgcgtttctgggggaaggaaatttcatacgacggtttccaggatggaagccggacccttcccctcttcctgtcagcgatggacctgcctgctatggatgagtcgcgatgaagaaccattctccagccgaactggaagcacggctgcgcctgcatggcctgcccgaactgggacccatgcgcttcctgcgcttggtcgaggccttcggttcggcctcttccgcgcttgccgcgccagccagcgcctggcgcaccctgggagtgcctgccgaggccgccgccgcgcggcgcagcccggcggtgcgggaagcggcgggtgaagccctgcgctggctggaaggtccgcgcaggcacctgctgatgtgggacgacccgggatacccggcactgctcgccgaagtcgccgatgccccgccgctgctgtacgtcgaaggcgctccggagactctggaacggccgcaactggcgatggtcggcagccgccgcgccagccccgccgggctgggcaccgcccggagctttgcgcgcagcctggcgcagggcggcttcgccatcaccagcgggctggccctgggcatcgatggcgccgcccacgagggcgcgctggaggctggcggcgcgaccgtggcagtcctcggcaccggcctgcgcaggctctatccgcggcgccacgaagcgctggcgcggcgcatcgtcgagggtggcggcgcgctggtttcggagctgccgctggacagcccgccgctgccggcaaactttccccggcgcaaccgcatcatcagcggactctcgctgggtgtgctggtggtcgaggcaagtcccgccagcggctcgctgatcaccgcgcggctggcggcggaacaggggcgcgaggtgtacgccattccgggttccatccaccatcccggcgcacgtggctgccaccaactgattcgcgatggcgcgctgctggtggaaagcgtcgggcacgtgctcgaagcactgcgcggctgggcgcaggcggagccagcggaagcgccggcgcagcccctgccccaccctttgctggcgctgctgcgcgccgcgccctacaccagcgaaggcctggccgccgccagcggcatgacgctgcccgatgtgctggcgacgctcagcgaactggaactcgacggccgggtcgcctgcgaggccggcacctgggtgcatcgctccggctgaaaccgtacacttcgcgcaccctgtccgctggagtgagtcgatgatcagcagctttcgtgcgcaatgcgccgcccgggtcgtccgcgagggcggcgtgatcgcctatcccaccgaggcggtatgggggctcggctgcgacccgtggaacgaggatgcggtgtatcgcctgctggcgctgaaggcgcggccggtggaaaagggcctgatcgtggtggcggcgaacatccaccagctcgacttccttctcgaagacctgccggacgtctggctggaccgcctggccggtacctggccggggccgaacacctggctggtgccgcaccaggagcgcctgccggagtgggtcaccggcgtccacgacagcgtcgccgtgcgggtcaccgaccatcccctggtacaggaactgtgccatctcaccggtccgctgatctccacctcggccaatccggccgggcgcccggcggcgcgcacgcggctgcgggtggagcaatacttccacgacgagctggacgctatcctcggcggcgcccttggcgggcgccgcaaccccagcctgatccgcgacctggtgactggacaggtcatccgcccggcctgagtacgcgcttcagggcaacagtacggtcgagccggtggttcgccgtgcggccagttcggtatgcgccctggctgcttcggccagggcgaagcgctggttgatctcgatgcggatgtcgccgcgctcgatcaggccgaacagctcgtcggccatcgcctggagtttttccggggtatcggcgtagctgcccagggtcggccgggtcacgtacagcgaacccttctgcgagaggatgccgaggttgaccccggtcaccggccccgaggcgttgccgaagctgaccagcaagccgcgcggcgccacgcagtccagcgaggtttcccaggtatccttgcccaccgagtcgtagaccaccgggcacttcttcccgtcggtcagttcgagcacccgccgcgccacgttctcatggctatagtcgatggtctcccaggcaccgtgctgcctggccaggcgcgccttttccggcgagctgacggtgccgatcagctgcactccaagggccttggcccattggcaggcgaacaggcccacgccgcccgcggcggcatggaagagaatggtttcgccgccccgcagttcgtaggtctggcgcagcaggtattgggtggtgagccccttgagcatcaccgcggcggcctgttcgaagtcgatgccgtcgggcaggtggaccagcttctcctccgccagcacatgcagttcgctgtaggcgcccagcgggccggtggcgtaggcgacgcggtcgccgaccttgaaacgggtcacttcgctgcccaccgcctcgacctcgccggccccttcgctacccagccccgaagggaagccgggggccggatagaggccgctgcggtagtaggtgtcgatgaagttcaggccaatggcgcgattgcgcacgcggacttcccgggggcccggctcggcgggttggtagtcgcggtattcgaggacttcggggccgccgtaggcagcgaactggatgcgcttggccatgctggaactcctgcttcgtcagggtttcggacggtcgcgccgggtgggcgaccctgggtaaaggccttcatccaagccttccccttgacggccgtcaagcgccggctacccatccagggtggtatgcttgcgccctcgtttcgtcgccagcccgcgccccgcgcggcctccccgctccaaggtgaactccgtgaccgaccgtatcgccgctgtcaaaacctacctgctcgacctgcaagaccgcatctgcgccgccctcgaggcggaggacggcaaggcccgcttcgccgaggacgcctgggagcgtccggccggtggcggcggacggacgcgggtaatcggcgacggcgcattgatcgagaagggcggggtgaatttttcccacgtcttcggcgatagcctgccgccctcggccagcgcccatcggccggaactggccgggcgcggtttccaggcgctcggcgtgtcgctggtgatccatccggaaaacccccacgtgccgacgtcccatgccaacgtgcgtttcttctgcgccgagaaggaaggcgaggagccggtctggtggttcggcggcggcttcgatctgaccccctactacgcccacgaggaagactgcgtgcattggcaccgggtcgctcgcgacgcctgcgcgccgttcggcgcggacgtctacccgcgctacaaggaatggtgcgaccgctacttccacctcaagcaccgcaacgagccgcgcggcatcggcggcctgttcttcgacgacctcaaccagtgggacttcgacacctgcttcgccttcatccgcgccatcggcgatgcctatatcgacgcctacctgccgatcgtccagcgccgcaagcacacgccgttcgatgaacggcagcgagagttccaggcctatcgtcgcggtcgctatgtggagttcaacctggtcttcgatcgtggcaccctgttcggcctgcagtccggcggccgtaccgaatcgatcctgatgtcgttgccgccgcaggtgcgctggggctatgactggaaacccgagccgggcagcgaggaagcgcgcctgaccgagtatttcctcgccgaccgcgattggctcgccggccagccctgacccgcccgcaggggacgagtccgctcgtcccgtcccactccggcaaaggaacgacccatggaccgctattgcgtattcggcaaccccatcggccacagcaagtcgccgctgatccaccgcctgttcgccgagcagaccggcgaggcgctggtctatgacgcgcaactggcgccgctggacgatttccccgggttcgcccggcgcttcttcgagcagggcaagggcgccaatgtcaccgtgccgttcaaggaagaggcctatcgtctggtggacgagttgagcgagcgggccacccgggccggggcggtgaacaccctgatccgcctcgccgacggtcgcctgcgcggcgacaacaccgacggcgccggcctgctgcgggacctgacggcgaacgccggggtcgagctgcgcggcaagcgggttctcctgctcggcgccggcggtgcggtgcgtggggtgctcgaacccttcctcggcgagtgcccggcggagttgctgatcgccaaccgcacggcgcggaaggccgtggacctggccgagcggttcgccgacctcggcgcggtgcacggctgcggtttcgccgaggtcgaagggcctttcgacctgatcgtcaacggcacctcggccagtcttgccggcgacgtgccgccgctggcgcagagcgtgatcgagcccggccgtaccgtctgctacgacatgatgtatgccaaggaaccgactgccttcaaccgctgggccgccgaacgcggtgcggcgcgtaccctggatggcctgggcatgctggtggagcaggccgccgaggcattcttcctctggcgcggcgtgcgtcctgcctcggcgccagtgttggagacgctgcgccgacagttggcaactgtctgagttgtcaggcggcatttgagacgtacgtctcaaattggcttccatctgacatgtaggaatcacaaaaccgggttaagacttcaggcttcactcactctcgagcgctgccgatgaaaaccttcgcccgcctggccgccggtctctgcatctgcgccatcgccagccaggccaacgcctggtcgcaaccgacccacaagaacatcgtcaaggatgccctggccttcatgaactcctcctacgccaccgaggagatgcgccaggcctaccggttctacgtgagcgccgccggcagcgaggcgcaggccggggagatcctcggccaggcggccttcgacgtggacgacttcaaggacacccgtctcgggggctggtgggtcggctacgaacacgcgccgctgtggggcgcggcttcgggcatcgtcaactacacctcgtactggcacttcctcaacctggcccgggacggcgactcccatggcaacccccacggcggctacgactaccgctaccacaaggtcgacggcggcatcgccgacgtcgactggtacgccatggtctatctctacaaccgcgagctgaagcgcgaggacttcgacaccaccgaggcgcactaccgccagggcacccgctcggactggcaggagcactacggcgacttccagaccgccgccttccagccgatcgataacctcgccacctactggttcgagcagttccgcgccgcgccttcgctgcagaccatcggctatgccctgcatgccaccggcgacgtggcccagccgcaccatgtgtggatcacctcggccaacggccattccagctgggaaggctgggtcgacgaccactacgccagcgagaagctcaacgacccggcggcggtggccaacctggtggggcgctacgacccgagcaagagcatccgcgacctgctcacccagaccggccaggtcgcctacgcgcgccccgagccgctctacgacaccagctacgagacgcgcctgcgggtggcgaaggagctgattcccgagtccatcgccctgaccgtcaccgtactgaccaagggcgccaacagcttcgatgcaccgactgctctctgatcgcgcccggggctggcgtcgcgcactgtgcgggatcgtcctcgggctgctggcgtgtagcgcccatggcgtccacgccaaggcgccgcaggatctgcggatcgacggcgaggtgctgccggggagaagcatcgacttgctcgagcaggccctgtcgcgggtcaagttcaacaccgacccgcagcagttgcgccgtggcctggtggaaaaccgcctgctggcgcgcgcggtggaagaccagcttaccgcgcagagccgcgccgatctcgacgccagcgtggagatcgaggccggcaacctgctcgaacaggtatacggcaggcgctaccgcgaggacctcgggccatacctgcgccagccccgggccctgagcgcggagcgtttgcgcgaggtgctggcgccgaggaaccgtggcctggtggaaaacagcctgctgctggacgagacgcagcgccgcgaggcggccggggtcgagctgatcggctggcagtttcccggccagccggcacaggtcctcgacctgctatcgctgtacgaaggcgacaacgtccagggtcaggtggaattgcaacagggcaacctcgcttacctggcgcgccaggtccagacccgcatccgccgcgactacctctggtaccgcctggcccgggacggcttcggcccggcagagcggcagggcgtgaggaccctggtgcgggacaagctggtgcgccatcgctatctgcaccagatcggcctctacagtgatttccaccatgagtccgatgcgctgcgggaactcgccggcaaggtcagcgacaaggacgccgaggcctactatcggcgcaacctggagcgttaccgcaacgtcgcgcaggtgcaggcggcgcatatccgcctggccgaccaggcgagcgcggacaaggtctacgccgagttgcgcagcggcctggccttcgacgaggcggtacgccgctattccctggccgacgacagggaccgcgacccgcccggcgacctaggcctgatacggccccaggacggccggctcgacctgctgcgcaagactgcgctgatccagaaggccgatacggtttcccagccgatgcgcatcgactgcgcgttcgagatcgtccgggtgcgtagccgcgaggatcgccagttgcccctcgacgaccgcagcgtgcgcttcgaggtgaaccaggcggtggcgcgcgagcaactggcagcgcagttcgagacgcgcctgcgcaacctgctggccggcgccagggtggaaggcctgtgaagcgctggctcggcgttgccctcggctgcagcgggctggcgatcgccctgacctgcgccggcgtgttgctggcgcctgccgatatggccgcttcctcgtcttctccgtcgccagccaggacggttgcggcactgcccgcggtcgacgaccgtccgccgccgccggcgccggtgcgatcgcaagcggcagcaccggcgtacgaggcggagcctccggcggcggaactggatcgcgagcaggcgatccagttcatgcagatgctgcgcgacgagggcgacccgcgcagcccgccgctcggcggcctgcaaccacgccagggcgcgacggcgcaggagctggccgatccgaagcagtaccaggccttcgaggaacgacagacccgcgaactggtacaggcctacaccagcggcgtacagcagataccggaaatccgcgcgcggatcgaggcggccgaacagggtggcgagcgcagcgccgaggaaatcgacgaggctcgcgccgcccttggacagttggagatgatgcgcgacaagctgcagcgggaatcgccgcaactgctgcccggcgacagcgcaccgacatcgccggcggcgccctgagcgtcagccttcgtagtgcaggcggcagccttcgtcggcctgccggcccagcgcttcgcggacctgcgggcgggcgtggcgcaataccaggcggcggccctcagcgtgcaggcggcgggcttcctgctgcaacagcactgcgccggcgaagtcgatgaagttcacctggcgggcgtccagcaccagccgtggcctgtcgcattggcgcatgaggcgttgcaggtagtcgcaggcgccgaagaagatcgagccttcgatgcgtagcacttcttcctcgtcgttgcgctggcgcagtacgcgtggtgtcgaggtgcgccgcaggtagaagaccagcgacgccagcactcccgcgtagatggcgttctgcagcggcaacagcagcgtggccagggcggttaggccggccaccaggcattcggcgcggccgctgcggtagagcgcgcggagcgctgggcggtcgatcaggccccaggcgatcagcaggatgcctgcggccatcgccggcaacggcacatgctcgatcaggcgcgcaccgagcacggccagcagtgccacccagagcgccgaaaacgcacccgccagcggggagcgcgcaccggcttccagattcagcccggagcgggtgaaggagcccgccgacaggctcgccgacagccaaggcccgagcaggttcgacaggccctgggcgcggacctcctggttggcatcgaacgcgtctccctggcgcgcggccagggcgcgggcgatcgataggctggtgaccagcccgagcatgccgcaggccaccgccgcaggtagcaggtcgaggatcgatcgggaatcgaagaccagcggattccagcccggcagtgcgctcgataaggcctgcacatgggctaccgaggcgaaggtcccgggtagcgcccagaccagcgtggcaccgcccagcaagccaagcagcagggccggccagcgcggtcgcaggcgcctgaccagcaggctgagcgcgaagctgaagccgcccaccagcagcgatgggccatcgaactcggcgaaccgcgccagcagccgccagccgtttcccggcgctgcgccctccccgctcgcggccaggccgagaagatagggcagttggccgaggacgatcagcagcgccgcgccaagggtgaagccgagcatcaccgaatgcgagacgaaattgaccagcgacccgacgcgcaggacgccgagcagccactggaaggcgccggcgagaaaggtcagcagcagcacggcctggacgtattgcgggctgcccagcggcgccagcggggccaccgaactgaacagcagcaccgagatcgccgcggtgggaccgctcaccaggtagcgcgacgagccccacaggcaggcgatcgccactggcagcatcgccgcgtacaggccgtactccgctggcaggccggcgatcagcgcataggccatcgattgcggcagtgccaggattgcgccattcaggccgacccaggcctcgcgcccgagcatgccccggtgcagccccggtagccaggcgaggaacggcagcaggcgcgtccacatggcgctatggctggccgcgaaccgcggccagggcgtcgccgccgtcgcggctggtcaccccttgcagccaggcctcgagcacctgcgggttggccttgagccaggcgcgggtcgccgaggccggagtcgtcgtgccttccagcgcgtcgctcatcaggcggttctccatgtccaggtcgaagcgcaggttggccagcagccgcgccgggttcgggcactgcgcggcgtagcccttgcgtgccagggtgtagacctggccgcggtcgccgaagtactgctcgccgccttccaggtagcgcaggtcatggcggatgttcatcgggtgcggcgtccagccgaggaacaccagccagcgctggcgcttctcggcccggccgagttcggcgagcatcgcctgctcgctggactccaccagcttccagtcgccgaggccgaactggttggcgtcgatcatcttctggatcgactgattggccggcgcgccggagccgatcccgtacagcttgcggttgaagcgttgcccttgcgcggcgaggtcctcgaagcggtgtacgccggcgtcccagacgtagcgcggcaccgccagggtgaagcgggtgccgtcgaggttgcgaccgaggcgttcgacctggccgctggcgacgaacttgtcgtgatagtcctggtgcgcgggcatccagccgccgaggaaggcgtccacctggccgtcgcgcaggccgccatagatgatcggcaccgacagggtatcgatcttcacctggtagccgaggctttccaggagaaacgcggcagtggcgttggttaccgcgatatcgctccagcctggatcggccagcctgacgcgggcacaggcggggtcttcggcgtatagcgaggcgctgcccaggaacagggtggcggccagcaggcaggtgggaagccggttcatggaagtgccctcgtgctcagggttgcgggaagcgcgcgcggcgctcgagatcgtccaggtcgatatggttgcgcatgtactgctggcttgcatcgacccacggctggtggtcccagctggccagccgtcctcgcgccagcgcggcggccaccaggcgtcggcggcgctggctgtcgagtacggcgcgggtgatcgcggggatgtcccagcgtcgccgggcctcgtcgaggaacgcctcgaacgttccgcgatgggccggactggcggcgaggttctcgcgctcctgcgggtcgttgcgcaggtcgtagagcaggcaggggtcctgctcggagtagatgaacttgtagtcgccgcggcggatcatcatcagcgggctgagggtgccctcggcggtgtattcgccgatcacctcgtcatgcccgctgccgtcgcgcaggtgcggcagcagcgagcggccttccagcggcaggcgtggatcgacctggccgccggccagctccaccagggtcggcagcaggtccacggtggataccgaagcgccgatgcggcgcggcgcgaagcgcgccggcgcatggaccagcagcggcacgcgcgcggccatctcgaaccagtgcatcttgtaccagaggccgcgctcgccgagcatgtcgccatggtcgccggagaacaccacgatggtgtcgtcggccagcccgcattcctccagggtcgccagcagcgcaccgatctgcgcgtcgacgtagctgcaggcgccgaagtaggcacgccgggcggcgcggatgcgctcctcgggcaacggcttgtcccacaggtcgatgaccttcagcaggcgttgcgaatgagggtcctgctcctcctgggcgaagcgctggcgcggcagcgggatgtcctcgtcgcggtagagattccagtagctcgccgggatgctgtaggggtcgtgcggatgggtcatcgacacggtcaggcagaatggctggccggcgtgctggcgaacatggtcgtagaggtactggcgggccttgaacaccacctcctcgtcgaagtccagctggttggtgcgcacgcagggaccggcctgcaaaaccgaggacatgttgtggtaccagctcgggcgcacctccggctcgtcccagttcaccgcccagccatagtccgccggatagatgtcgctggtcaggcgttcctcgtagccgtgcaactggtcgggaccgcagaagtgcatcttgcccgacagcgccgtgcgatagccgaggttgcgcaggtagtgggcgtaggtgggggtatcggcggcgaagtcggcagcgttgtcccaggcgccgatgcgggtaggcaagcgaccgctgaccagggtgaagcgcgacggcgcgcagagcgggctgttgcagtatgccgagtcgaacaccacggcccgttcggcgaggcgcgagaggtgaggcatgcgcagcgccgagcgcggatcgtgaagcggcagcagcggcgcggccatctggtcggccatgatgaacaggatgttcggcgaggtcttcatcgggcggcttatcccatgcgattgggttatgcgatagtgctgcgtcgatcatcagtgcatcgaaatccctggtaaaccgcatggggctggatgcgttggataagccgggcttatgtgagaacacctcatgccgccatccctcgacctgctccgggtattcgagtccgccgcccgccaactcagcttcaccgctgccgccgaggaactggggaccacccagcctgcggtcagccagcagatcaaacgcctggagaaagagctggcgacccctctgttccagcgcgttcatcgaggcatcgtgctcaccgacgccggccagcttctgctccgccacgtggccgccggcctcgagacgatcgatgccggcatcgccgcgctgggcgcgcgccagcgccacgaggtgctccaggtggccaccgactacgccttcgctgcctactggctgatgccgcgccttccgcgcttccatcaggcccatccgcacctggacgtgagcctggtgaccagcgagcgcggcctggccggccagcgcggcgatatcgacgtggcgatcctgttcggcgacggtcgttccaagcacggcgaagcgcaccggctgtttcgcgaggaggtgttcccggtctgtagcccgcggctggtcgagggattgcagttgccgctggccaaggcgcacctggcgcgcctgccgatgctgcatctgaagccggcgcagcacgcccgctggttcgactggccggcgttgttcgaagcgttggccatcgatcggcagccgattccggcggtgctcagcttcgacaactacaccttgctgatccaggcggccatcgccggccagggcgtggccatcggctggcgccacctggtcgacggcctgctcgaacaggggctgctttgccggcccattggcgagagctgcctgtcgcgatacgggtactatgcggtattgccggagcgcaagcggcgccagcggctggtcgacggtttcgtcgactggctgcaggccgagttgcaggccggcggcgcttgaagaggtgacgatgaacgagtattccaccccccgcatccagggcttccatgctcacgtctatttcgatgcgcagagcatcgagcgagcccgcgccctttgcgaagaggcggcgcggcgctttccgctgaagatggggcgggtccatgagcggccggtagggccgcatccggactggagctgccagctggcgttcgctcccgaggtgttcggcgagctggtgccctggctggccatccatcggcaggacctggtggtgttcatccacccggttaccggcaacgatctgctcgaccatcgcgaccgagccatctggatgggagccattcgcccgctggacctgtcgatcctggacgaaggcccgcaacgctatgacttcgccgtgccttgaggcgcggtcatcgtcatccagtcgtgcagttcgcattgcagctcgcccagtgccgtcaccaggtcgtcgacggcatcggcgagcttgcgcacggagctttcgccgcaggcgatctccagttggtggcaggcgcgttccacggcgtgggcgtggatcagcgaggccatgcccgccaggcggtgcgccagctcgttgagttcctgggtctgctcgcgctcctgggcgcgtcgcagcttgcgggtgtcttcgttgttgctggtcatcagctgcgcgacgagcaggcggctgatctccggttggttggcgcggtcgcccagggcggcggtcaggtcgaacgttcgcatgggatcctcagatcagctcgtggcggcgggcgaaatcgatcaggccggccagggagtgggcgttgagtttcagcatgatgcgtgacttgtaggtgctcacggttttctcgctgaggaacagctgctgggcgatggccttgttggtattgccgttggccaggtactgcagcacggtcatctcgcggtcggaaaggctttccagcatgcgggcctcgttgtcgcggctctgctggttgatgctgcgcaacgccccggtggggaagtggatgtagccggccagcacggccttggcggcgagcagcagctcggagaggttttcccttttgctgacgaagcccatggcgccggcctgcaggcagcgcggggcgaactgcgccggattctgccgggtcaggaccaggaccttggtgtccagcttcagggacttcaggcgggctatcacttcgagaccgtcgatcttggggatgccgatgtccaggatggccaggtcgggagacttcttgcgggctacctgcagggcttcggcaccgttgtcggcctcgccgacgatggtgaaaccgtcgcgctcgaacagcaagcgcacggccaggcggatagcgggatgatcatcgacgatcagcaccttactcatgcgaaccttctttgaatgcgttggctatttgggtgaggcgctattcaaggcttcggcagagtcggcggacaataagacgtttctgaaagtgaccgtgaatttttcctcacggttctggcagcgtgcaacgcaaggccaggcgcagcgggttgcctgcgcctggcgaatgccgctgtcagggtctgtcagcgtgcgttgcgcacgccttcggccagctcgccgcacagggcgaggacatccttgaccgcctgggcattgtcgcgggccttggcgatccggtcgatcagcgccgagccgaccaccacgccgtcggccaaccgcgcgaccgcggcggcgtgttcggcgctgcggatgccgaagccgataccgatcggcaggtcggtatgccggcgcaggcgcgccaccgcttcctcgacgtgttccagggtcgccgcgttggcgccggtgacgccggccaccgacacgtagtagacgaacccggaactgccttctagcaccgttggcaggcgctggtcgccggtggtcggggtggtcaggcggatgaagtcgaggccggcggcctgggccgggtggcagaggtcttcgttgtgctccggcggcaggtcgaccacgatcaggccgtccactcccacctccttcgcctcggcgatgaagcgttcgacgccgtagtggtggatcgggttgaagtagcccatcagcaccaggggcgtctcactgtcgccgctgcggaattcgcggaccatctgcaacgtcctggccagggtctggccgccttcgagggcgcggatgttggccaactggatggccgggccgtccgccatcggatcggtgaacggcatgcccagttcgatcacgtcggctccggccgccggcaggcctttgaggatttccagggaagacgcgtagtccgggtcgccggcggtgacgaaggtcaccagggcggcgcggttttcctgcttgagctgggcgaagcgggtctgcaggcggctcatgctttcgactcctgttgcatgtggtgcatgacggtctgcatgtccttgtcgccgcgaccggacaggttcaccaccatgatgtgctccttgggcaggctgggcgcacgcttgaagacctcggccagggcatgggagctttccagcgccgggatgatgccttcgaggcggcagcaggtgtggaaggcctccagggcttcgtcgtcggtgatcgaggtgtactcgacgcggccggtgtcgtgcagccaggcgtgttccgggccgatgccgggatagtcgaggccggcggagatggagtgtgcgtcgatgatctggccatccgcgtcctgcagcaggaaggtgcggttgccgtgcagcacgccgggaaccccgccgttcaggctggccgcgtgcttgccggtgtcgatgccgtggccggcggcttccacgccgacgatctgcaccccggcgtcgtcgaggaacgggtggaacaggcccatggcgttggagccgccgccgatgcaggcgaccagcgaatcgggcaggcgcccttccttctcggccagttgctcgcgggtttccttgccgatcaccgcctggaagtcacggaccatcgccgggtacggatgcgggccggcgaccgtgccgatcaggtagaaggtactgtcgacgttggtcacccaatcgcgcagcgcctcgttcatggcgtccttcagggtaccggtgccggcggtcaccgggatcacctcggcgcccagcagcttcatgcggaagacgttggcctgctgccggtcgatgtcggtggtgcccatgtagatcacgcactgcaggccgaagcgcgcggcgacggtggcggtggccacgccgtgcatgccggcgccggtctcggcgatgatgcgtttcttgcccatgcgccgggccaggaggatctggccgatgcagttgttgatcttgtgcgcgccggtatggttcagctcctcgcgcttgaggtagatcttcgccccgccgcagtgctcggtcaggcgctcggcgaagtacagcgggctcggccggccgacgtagtcgcgctggaagtaggccagttcctcctggaacgccgggtcgtccttggccttctcgtactcgcgggcgaggtcgaggatcagcggcatcagggtctcggcgacgtactggccgccgaagcggccgaacaggcccttggcgtcggggccgttgcgataggaagtcatggagggctccaggaaatgacgtatgggcagaatctaatccccccgccgggtaaaagaaaccgataagattgcgcaaacctgtcagaaaaactcacgaatagccatgagccgcgacctgccctccctgaatgccctgcgcgctttcgaagccgctgcccggttgcacagcatcagcctggcggccgaggaactgcacgttacccatggcgccgtgagccggcaggtgcggttgctcgaggacgatctaggggtggccctgttcggcaaggatgggcgcggcgtaaaactcaccgattccggcgttcgcctgcgtgacgcctgcggcgatgcgttcgagcgactgcgtggcgtctgtgccgagctgcgccggcagaccgccgaggccccgttcgtcctcggcgtacccggcagcctgctggcgcgctggttcatcccgcggctggaccagctcaaccgtgccctccccgacctgcgcctgcaactgtccaccagcgagggcgagttcgatccgcgtcgtcccggcctggacgccatgctctggttcgccgagccgccctggccggcggacatgcaggtcttcgaactggcgcccgagcgcatgggcccggtggtcagcccgcgcctggcgcaggaaaccggcctggcccaggcgcccgccgcgcggctgttgcaggagccgctgctgcataccgcctcgcgaccccaggcctggccggcctgggccgcgagccaggggctggcggcggaggcgctgcgctatggccaggggttcgagcatctctactacctgctggaagcggcggtggcgggcctcggcgtggccatcgccccggagccgctggtccgcgacgatctcgccgcgggccgcctggcggcgccctggggcttcatcgagaccgatgcgcgcctggccctgtgggtaccggcacgcctccacgatccgcgtgccgggcgcctggcgcaatggttgcgggagcagttggcaggctgagcgctggcgatttgctgcacttttccggctcggctagtgtccattgaacagaggcgcccgtcgggcgcgaagaaccaggcatcgtccggggagagagttcatgtccaatcaccacacctacaagaagatcgaactggtcggctcgtccaagaccagcatcgaggacgccatcaacaacgccctcgccgaagcggcgaagagcatccagcatctggaatggttcgaggtggtggatacccgcgggcacatcgagaacggcgccgtcggccattaccaggtgaccctgaaagtagggttccgtatcgccaatagctgatggcaccctggaaacctgtccacgatcgcctgcgccctggaaaggccgccgtgtctttccgcttcgccggatcatgcacaggctatgagggcggcgtgcctccatgggcggcgcgctcgtctcaaccttgccgcatttggcaagcctgacccgttcgggtcttcatccatgcaacgagggaatgtgttcatgaagaagttgatgttggcagtcggcctgtttgccgtggcgggcagcgcattcgccgccaagccctgtgaggaactgaaagccgagatcgatgcgaagatcaaggccaacggcgttcctgcctacaccctggaaatcgtcgacaagggcagcgtcaccgacaagaaggtagtcggcacctgcgacggcggcaccaaggaaatcgtctaccagcgcggctgatgcagcgcctgcgacgagcagtatccggggccggctttcccatgggagccggccctttctttttgccgcgatgagtaccctgccaacgatgggtcttgttgcagttcgtcgagaaagcgtgccatctaacggattaatccaaaagtctgtgttaggtttttcggcacgcccagatggccttgtgccttaattccggattgtccgactcatggaagacggatttcggaatattcctgcttacccgctgtagccgctgggccaacatcgcgcctttctgtatttcaaggaatgaaatcgtggctctccatcgcctggcctttatcttcctgtgcctgccgctcatggccagcgccgcccccttcacctcccccggcgaccgcgacctgatccgcgaccgccagcagcgcctgctggacgaacagcgcaagcgcctggaggaactccagcaactgcccggcaagggagcgcccgccgctgcggatgcctccggcgacgacgagcgctgcttcgagatccgccgcatcgagctggaaggcgccgggcacctcgacgaaagcgcgcgtcgccagttgctggcgccctaccaggggcgctgcctgggcgtcggccagctcaatgcgctgctcaaggccgtcaccgaccattacctggatcgcggctacgtcaccacccgcgcctacctgccacagcaggacctggcctccgggaccctgcgtatcatcgtcgtcgaaggccgcctggagggcctggacagctccgcgctggccagcccgcgcgaactggcgatgagctttccgggcaggaccggcgagctgctcgacctgcgcgaactggagcaactggtcgaccagttgagtcgcctgccgtcgcgccaggcgcaactggagctggtgcccggcagcgaggtcggcggcagccgggtgcgtctcaagggtgagcgcgacaagccctggcgggtctccgccacgcgcaacaacgacggcgacgtcagcaccggcgagcagcagatgggcctgggtctggactgggacagcccgctgggcctggccgaccagctcaacctgcgcgccaaccgcgacgcggtgaccgaccgctggcgccattccgacagccagagcctgttctacaccctgccctggggttggtggactttcacctacggctacagccagagcgactaccgcacgcgcaacgaggccagcggcttccccttcaagctcgatggcgacagccgcagccaccagttccgcgccgaacgcgtgctgcaccgcgacggcgtgagcaagaccgccatgagcctggggctcagccaccagcgcaccaacaactatgtcgaagacacccgcctggaagaccagagcacgcggatcaccgagacccagctcggcttcaaccatggccggcggatcggcagtggcttcgtcaacctcgacctcggctggcagcagggcatcggcgcccttggcgcgcagggtcgcggccacccgcaggcgggcgatccgaatgcgcgctacgacaagtacagcctgaccctcagctacctgcagccgttccagctatggggcgagcgcttcagcttcgacagcctggccaccgggcaaaggagcgaggacgtgctgttcagcccgcagcgcatcagcctcggcggcaacagctcggtgcgcggcttcaaggaccagaccctgaccggcgacagcggcggctactggcgcaaccagttgcgctggcggcgcgcggtggaatgggcgccgctgcggccctggctgcaggaatacggcgtggccttcgcttacgacgtcggcgtgatccgccacgaccgctacaacgacggcgccagcgggcgcatgagcggcaacgccatcgaactggatgcccgcggccgctatttcgccgccagcgtcggcttcgcccgctcgctggagcggcccagcgccatcgagcggcgcgagcacccgatctatttccgggtcgacgcgttcttctgaagacgcggcgacctcctgaacgctttaggaaagcgcctacctgcatcgaggccctttccttggaaaaccttgcttaacctcgccgggcccctatccgccaaggagtaacgatatggacatccgcagcccgctgaaccagtgcatcgccctgtccctggccggcatcctgttcctcaacccgatcgtcgccgcggcggcggggctggcgctggacaaggccgccggcggcaacaccggcctgggccaggcgggcaacggcatgcccatcgtcaatatcgccacgcccaacggcgccgggctgtcgaacaaccatttccgcgactacaacgtcggcgccaacgggctgatcctcaacaacgctaccggcaagacccagggtacccagctcggcgggatcatcctcggcaaccccaacctcaagggccaggcggcgcaggtgatcctcaaccaggtcaccggcggcaaccgcagcaccctggccggctacaccgaggtggccgggcagtcggcgcgggtgatcgtcgccaacccgcacggcatcacctgccagggctgcggcttcatcaacacgccgcgcgcgaccctcaccaccggcaagccgatcatggacggccagcgcctggagcgcttccaggtggacggcggcgacatcgtcgtcgaaggcgccgaactgaacgtcggcaacctcgaacagttcgacctgatcacccgcagcgccaagctcaacgccaagctctacgcgaagaacctcaacatcgtcaccggccgcaacgacgtccaggccgacagcctgcaggccacgccgcgcgccgccgatggcagcgagaagccacagctggcgatcgacagctcggcgctgggcgggatgtacgccggggcgatccgcctggtcggcaccgagcagggcgtgggggtgaagctggccggcgacatggccgccagcggcggcgacatccgcatcgacgccagcggcaagctgagcctggcccaggcctccagccagggcgacctgaagatcgcggcccaggccgtggagctgaacggcaagacctacgccggcggcagcgccgagattcgcagcgcggaggaactgctcaaccggcagagcctggcggcgcgcgaacgcatcgcgctggaggcggcgcatatcgacaacgccggggtgatcgaagccggcgtcgagccagacgagcggcgcaacgcgcgcggcgacctcgagctgcgcagcggcaccctgcgcaacgccggcagcctggtggccagccgcgcgctggaagcgaaggcgagccaggcgctggacaaccagggcggcagcctgaagggggcgaccgtccgggtcgacgccgggcacctggacaaccgtggcggcaagctgctcgccgagggcgaactgcgggtcgaggcgagcagcctggacaaccgccaggacggcctgttgcagagccgggaccgcgccgtggtcaagacccgtggcgatctcgacaaccgtggcggccaggtgatcggcctgaacgatctggaggtcggcgcggcgacgctcgacaacggccagcaaggcctgctcggcagccagcagtccacccgcgtcagcgcccaggcgctggtcaaccggggggacggcgaagtctccggcaagcgcgtcgaggcccgcgtcggtagcctcgacaatcgcggcggcaagctgatcggcgacgacctgctggtggtcgccagcggtgccatcgacaaccgcctcggcttgttctccgcagccaaccgcctcgacctgcgggcgcgcagcctggacaacagcggcaagggcacgctgagcagccggggcggcctggaggtcagcctcggcggcctgctggacaaccgcgatgaaggcaacctgctcagccagggcgcgcagcgcgtgacggtggggcaactggacaaccgcgccggcggcctgctgtcgagccgcagcgagttgaacgtccacggcgccagcctggacaaccgtggcggcgtgctggtggccgacgccggcctgagcgccacgggaggcgccttcgacaaccgcgacggcggcagcgccagcggcaaggctggcgtgcgcgtggaggtcgccagcctgcgcaacgaccagggtggcaagctgctcagcgatggccgcctggacctcgcagcgaacgccgtcggcaacgccggagggcgtatcgccgccaagggcgacctgcaggcgacgcttggcagcctggcccagcaaggtggcgaactggtcagcgaaaagaccctgaaggtcgcggccgacacgctcgacaacagccagtccgggctgatcgccgcgaatggcggcatcgctatcgaggcgcggcaggtcgacaaccgcgccggcgagatttccagcacctcgagggtcgccgtgaacgcccgcgagcaactggacaaccgcggcggcaaggtcatcggcgacagcggcctgcgcctcaccgtgcagcgcctgctgaaccaggccaagggggtgctggccgggcgcgacggcctgagcctggacggcggcgaactgttcaacggcgacggcggtcggctcgacagccagaacagcctgagcgtgagcctcggcggcgtgctggacaaccagggcggcgcgctggtcagcgaaggcagcctgacggcgcgcgccgcgcgcctggacaaccgtggcgggaccttctccagcgccggtgcgctggcgctgaccagccaggccgcgctggacaaccagggcggcaggctgctcagcgatgccggcgtgacgctgaagggcgccagcctcgacaacagccgttccggcgtgatcagcgccaagggtgcggtggatatccgcaccggcgtgctggacaacagccgcaacggcggcatcggcagcaacgccggcatcaccctggtggccgcccggctggacaacggccagcagggccgggtcagcgccaagggcctgctcgacgccaacctgaaaggcctcgaccagcgcggaggcggcgtcctggtcagcgaaaccggcgtcaccctcgacctcaatggcggcacgctggtcaaccgcgacggcggcctgatcgccacgcccggcgcgctgctgctgcgccagctcggcgcggtggacaacggcgccggcggggaaatctccagcgaccgcgccttcaccctcgccgccgccagcctggacaaccgcggcgggcgcctgatcggcgccgacagcctgaccctgcgcatcgcccaggccctggacaacagcctgggcggggtgatctccggcgccgccggcctggacatcgcggccgctcgcctggacaacagcgccaagggcaccctggccagccgcgccggcatcgacctgcgcgtcgacggcgcgctggacaaccacgccgaaggcaccgtttccggcgcccgcctgacgctcgccagcgcctcgctggacaacagcggcaagggcctgctctccggtaacgccggcctgagcgtcgccactggcgcgctggacaacgccgagggtggccagttgatcagccagggcgtgctggacgtcagcagcgccgacctcgacaaccgtggcggcgccctcagtggcaagcagtcgctgcgcctgagcgccgccaacctggacaaccgtggcggcctgctcaccagcgacggcgaactggaactgacggcagggcgcgtcgattccgccgacggcggcgaaatctccgcccggggcgacctgcgcctgacggtcgagcgcctggtgcaacgccagggccggctggtcggcgagcgcggcgtcagtctcgacctgcggggcggcgacctggacaaccagggcggcctgatcagtgcccgcggcccgctgagcatcgagcggctgaacgtcctcgacaaccgccagggcggcgagatttccagccagcagggcttcgagctgctggccaggcgcatcgacaacggccagcaggggcgcatcatcagcgccgggaaactgcgcctggacgccgacgcgctgggcaacgccggcgccggcctgctctccggatggcagggcctgacggtgacaggcgggagcctggacaacagcgccggcggcaccctttcgagcaaggacggcgagctggccatcagcctcggcggcgcgctggacaaccacggccagggcgccctggtcagcaagggcgcgcaacggatcgacgccgccagcctggataacgcccagggcatcgtctccggcgaaagcgacgtgaccctgagcatcgccggaaagctggacaacggccagggcggcctggtctcggcgcagcgcgcgctgagcttcgagcgcgacgatacgctgctgaacaacgccggcggccggatcaacggcggcagcctgctgctcaagggcgccagcctggataacagcgacggccagttgatcagccagggccggctcgacgccatcctcggcggcgccctggtcaacaccggcgcggcgcgcctggccagcggcggcgacctgctgctgcgcagcgccagcgtcgacaaccgcggcggcaagctggtcagccaggggctgctggagatcagcgccggcagcctcgacaacagcgcctccggcaccctcgccagccaggccgacatgagcctgcgcctgggcggcggcgccctgcgcaaccagcaggacggcctgatcttcagccaggccggcgccctcgaggtgcaggccggcagcctggacaaccgccagggcacgctccaggcccagggtgacaaccggctgcgtatcggcggcgcgctggacaaccagggcggccgcctggacagccgggccggcaacctcgacctgcagagcggcagcctcgacaacggcgccggcggcgtgctcaacagcgccaagggttggctgaagctggtcaccgggctgttcgacaacagcgccggcgtcacccaggcgcagtcgctggagattcgcgccgggcaaggcgtgcgcaaccagcagggccacctctcggcgctgggcggcgacaaccgcatcgtcaccgccgacttcgacaaccagggcggcggcctctacgccagcggcctgctcagcctcgacggccagcgcttcctcaaccagggcgcggcggcgggccagggcggcaaggtcggcgccgggcgcatcgacttcagcctggccggcgcgctggccaaccgcttcggccagttggaaagcgaaagcgagctgcacctgcgcgccgccgcgatcgacaacagcggcggcagcctgcgcgccctcggccgcagcggcagcacgcggttggtcgctggcggcctgaacaacgcctacggcgtgctggaaagcgccaaccaggacctcgacctgcaactgggcagcctggccaacgccggcgggcgcatcctccacaccggcaacggcaccttcggcctggattccgggcaggtgatccgcgccggcggcgaactgaccaccaatggcctgctggacatccgcgccagcgaatggaccaacagcagcgtgctgcaagccggacgcctgaacctggacatcggcaccttccgccagacggccgagggcaagctgctggcggtgcagtccttcactggccgcggcggcgactggagcaacgacggcctgctggccagcgacggcagcttgcgactcgacctgagcggcggctaccgtggcaacggccgcgccaccagcctcggcgacttcgccctgaacgccgccagcctcgacctcggcaatgccgccagcctcgccggcggcgccaatgtcacgcttggcgccggcaacctgctggtcaaccgtgggcggatcaccgctgccggcgacctcgtggccagcgccgcgagcctgaacaactacggcaccctgggcggcggcggcaacctgcgattgaacgcgcccgccctgctcaacgagcgcgggttgctgttcagtggcgccgacatgaccctgcgcgccggcgacatcaccaacctctacggggatgtgtacagcctcggcaggctggatatcgcccgcgacgatgccggcaaccgtgccgccagcctgcgcaacctttccggggtgatcgagagcggcaaggacttcagcctgcgtgccagcctgatcgagaaccgtcgcgccgtgctggaaagcaagtcgggcctgtacaccgcgaagatggagcagaccgcctgcatcgaaggcgtcaacgcgggcgactgcagcggcaagcgcaacgccatctggaccatcacccagcgcgacaagaccgaggtcaccgccagcagcgccatggggcaactgctggccggaggcgacttcgccatcgacggcggcaccctgaacaacctttccagtctgatcggcagcggcggcaacctcaccgccaacctcgaagtcctcgacaaccagggcctggaaaccggcgagctggaaaccatccgcgtgctgcgtaccgctcgcggcggcgatatcggcggcatcgaccagaagtcgcgcaacttcaccaacctctactggtaccagagcgccaatttcgacccggcgcgcgcgggcgagatccccgccgcgctcaacgcgatcctcagcgactggtccttcgagtacgaattcccgagcaaggggccgaccccgatcagcagtggcgaccagtcctacgcagcggtgatccaggccgccggcgacgtcacggtcaatgccagcacgcgcatcgacaacggcgtcacccgccccggctacaccttcgtcggcagcggccgccaggtgggcgacagcgcggtgggcggcagcggggtttcggtggtcgtgccgctgacctcgcaactgccgcccgacctggcgcggcgccaggtcaacccggttaccctgcccggcttcagcctgccccagggtgacaacggcctgttccgtctcagctcgcgctttgccgaggacggcaatggcagcgccgcgctcggtgccggcgccgaccgcacccagggcggtagcggcgtctcggtcggccagcaaggcgccggcaacgccgccggtacctggcagggccagggcgtgcgagtcgacggcctggctggcgcggccaacgtccagggtcagggcggcagcacgctcggcggtagcctgccgggcgtcgcccgggtccagggcgtgcccggcaacgccacgccgagcgccagccacaagtacctgatcgagaccaacccggcgctcaccgaactgaagcagttcctcaactcggactacctgctcagcggcctgggcatgaacccggacgatagcaagaagcgtctcggcgacggtctctacgagcagcggctgatccgcgacgcggtggtggcgcgcaccggccagcgctacatcgacgggctgagcagcgacgaggcgctgttccgctacctgatggacaacgccatcgcttacaaggaccaactgcacctgcaactgggtgtgggcctgagcgcggagcagatggcggcgctgacccacgacatcgtctggctggaagaggtcgaggtgaacggcgagaaggtcctcgcgccggtggtctacctggcccaggcggagggtcggctggcacccaacggtgcgctgatccagggccgcgacgtgaagctggtgagcggcggcgacctgcataacgtcggcaccctgcgcgcgcggaacgacctctcggcgacggccgacaacctcgacaacagcggcctgatcgaggccggcaagcgcctcgacctgctcgccggcgactcgatccgcaaccgccagggcggggtcatcgccgggcgtgacgtgagcctcaccgcgctgaccggcgacgtaatcaacgaacgcagcgtgacccgctacgacagcgcgctcgacggccgcacctgggaacgcagcttcgccgacagcgccgcgcgggtggaggcggcgaacagcctgaacgtccaggccggacgcgacatcgccaacctcggcggggtgctgcagagccgcggcgacctcagcctcgacgccggacgcgacgtcaccgtcgccgccgtcgaggaccgccagggccagacccgctggagcacgtcgcggctccagagcgtgacccagctcggcgccgaagtcagcgccgggcgggacctgaacgtcagcgccgggcgcgacctcagcgcagtggccagcgccctcgaagcgcgccgcgacatcgccctctccgccgggcgcgacgtgaccctggcggcggcggcgaacgaggagcatgcctacagcaagaccaggaaggtcacctaccaggaagacaaggtcgcccagcaaggcacccgcgtggatgccgggggcgacctggcgatcaatgccggacaggacctgcgcctgatcgcgagccaggccagcgccggtgacgaggcctacctggtggccggcgacaagctggaactgctggccgccaacgacagcaactactacctgtacgacaagaagaagaaaggcgacttcggccgcaaggaaacccggcgcgacgaagtcaccgacgtcaaggcggtgggcagccagatcagcagcggcggcgacctcaccctgctcagcggcggcgaccagacctaccagggcgcgaagctggaatcgggcaacgacctggccatcgtcagcggcggcgcggtgaccttcgaagcggtgaaggacctgcaccaggagagccatgagaagagcaagggcgacctggcgtggcagtcgtcgaagggcaagggccagaccgacgaaaccgtgcgccagagccagatcgtggcccaggggaatctggcgatcaaggccgtggaagggctgaagatcgacctcaagcatatcgaccagaagaccgtaagccagaccatcgacgcgatggtgcaggcggatccgcaactggcgtggctgaaggaggccgagcagcgcggggatgtggactggcgcatggtgcaggaggtgcacgatagctggaagtacagcaactcggggctgggggctgcgccgtcactggccattgccatcgttgcggctgcttacctcggcccggtgtatggcgcaatggccagcaatcttgcgaccgggaccataaacaatggcggtgacttcggaaaggggctgaagtttgcgacgagctccaatgctttgaagggatatgccgttgcgggtgcgacagcttatttggtcagtccgcaactggatgagatgtttggtgtaagcactgacaacgtcaataaagtcactaaaggatttgacctgagcactatgagtggtctaggtgggttcgccacctattctatcattcaaggcctctctcaagcgggtatgcaaactgccgcatttggtggaagttttgcagacaacttaggtgatgcaatggccggtcaagcaacaaacttggctatggctgctggattcaatctcatcggtgattgggctgatggaaagtttgattctggctctccgcaaaaagttatggtgcatgccttgatgggaggattgctcgcccaggcaacaggtggagacttcaaaactggggctatggcagcaggggctaacgaagcgcttgtcaatgtgctgtctaacatggccggtggcgaagaaaagctagagcttatggcctcacagctaacaggtcttcttgctgctactgtagttgatggagatgttgcgaaaggggcagagattgccaagaatgcaacggcctacaatcagcaggctcaccgggacgctctgagtcgactgaaaagaggaatgagtgcgcttcatgaacaaggcaagtatgctgatctcgagccggagacagtgcttgctgacctgcaaaaaatagccagtggcgaagccaaaagcgtttcagatttgaacccgaaagtggttcagtttctgaatagtgagttttctcctgcgagcctgagagaaacgttgtttgagccggagtcctgggaagagtatgctgcgatagccgtcgatgtactttatccaacgcctggggggaaggcagcagctattgagaaggctggtggtaagctgtctaaagaggcgttggaagctctggagaagaagttttcttctgatgctttaaagaatgcactatggacttcaacgaaaagtaaatcagccattgaaaatgcatttggacattggcagaagcacaagggcgagtttccagagtttaaaaatgccaagcagtacgttgaaggtacgcagaatttcttgagtagtccgcccccggggacgttaaccaagacacgcccaaatggtgatacactactattcgatccaaaaaccaataccttcggggtaaaggacgcaaatggtgcgccgcgtaccatgttcaggcctcaggacggcattaactattggaataggcagtaaggagagcccaatgagatatccttgcccgtgctgtggatacttaacttttgatgaggagccgtgcggaacttatgaaatatgtcccgtgtgttactgggaagatgacattgctcagaataaagaccctgattatgatggtggtgctaacgggataagtctgaacaatgctaaagagaatttttttaaatatggagcgataaagcgggaatttttaaaaaacgtcaggaaacctttggatgacgaatcactatgaccataaggggtaaaggagcccaaaggggtaagccaaaaagaaaagatttatttttactactctaagtctaaaaggcacataaaggggacagatttattttccctactctaattttctaagcagggaggcttcagcgcagacgccgtaaggaggctccgcgatgcctaggcaagggcgagtggttttaccgaattatccgcttcacgtggtccagcggggacacaatcggcaagtggtattcgccgaggacgaggactaccagcgttacctctccgatctacgggacctcaaggatgcctttggtatcaaggtctacgcattttgcctgatgaccaaccatgtccatctgctcttggcgcctggtgattcgctgtctgacttggcgcaactgatgaaaacgctggcggcgcgcacgacacgatatcggaatcgcttggagggccgttccggaacgttgtgggaaagtcgctataaatcgagtgtcgtacagagcgatgcctacctgctggcgtgttgccggtacatcgaactgaaccctgttcgggcgcggatggtggacgatgtggcggcctatccctggtcaagttatgggctgcgggcggattggttgaaggagccaaactggttggatatggatccctgcttcattgagctaggtcagacggccgaagagcgatatcggcgatacgtaacgttcatgaaagaggcgataccggccgaggagttgaggctgattcgcgaggcggttcagcgtggacaactgacgggcaatcaacggttcgtggacgagatcgagcgggtagccggggtgagaatagagcggcgtgggcaagggcggccgagattagagtagggaaaataaatctgtccccttttttccaagcaatatcaaaacaaagaggttaggtttgcagtcgatagtagaggcgatattcaccgcttcgagggggctaatggggagtttcattggaatggaagcagtggtgatttaagaaatcctttggttggcagtcaaataccaaacgacatacaaaagcaattgggagttagagtgaaatgatagttggagatccattctattttgccctccagtttgatgtggttgatagttggaactcgcctggtgattcttggagaaatgggattttttatttgtatgtgagtggggagaagatttttagtgttgtcgatgttcttgagctggaaacaatattttctttttactctaaggctcccatagaagggttgtgtgttaatgatgtgcaattgaatagtgctgatatttataagagtgcgagtgaatatttttggggtgacggtgtcgaggtggtgaaaggcttgtttgatttaacggctacggcaatgagtgataatgggtgttttctctattttataaaaacaagtattggcgatagacttgtttggagtgtggatgggggcatgtgtcaaagaggtgtatctggagatggatgttgtattgaatgtgatcaagaagcttcgctcctgctctttataagttgccgaaagaagaaaagggggcggcagcataaaggggacagatttgaatggcacttacttaagcgctaagcgattgattccagaaagagcataaaggggacagatttattttccctactctaattttctaagcagggaggctccagtgcagacgccgtaaggaggctccgcgatgcctaggcaagggcgagtggttttaccgaattatccgcttcacgtggtccagcggggacacaatcggcaagtggtattcgccgaggacgaggactaccagcgttacctctccgatctacgggacctcaaggatgcctttggtatcaaggtctacgcattttgcctgatgaccaaccatgtccatctgctcttggcgcctggtgattcgctgtctggcttggcgcaactgatgaaaacgctggcggcgcgcacgacacgatatcggaatcgcttggagggccgttccggaacgttgtgggaaagtcgctataaatcgagtgtcgtacagagcgatgcctacctgctggcgtgttgccggtacatcgaactgaaccctgttcgggcgcggatggtggacgatgtggcggcctatccctggtcaagttatgggctgcgggcggattggttgaaggagccaaactggttggatatggatccctgcttcattgagctaggtcagacggccgaagagagatatcggcgatacgtaacgttcatgaaagaggcgataccggccgaggaattgaggctgattcgcgaggcggttcagcgtggacaactgacgggcaatcaacggttcgtggacgagatcgagcgggtagccggggtgagaatagagcggcgtgggcaagggcggccgagattagagcagggaaaataaatctgtccccttttttcttacattaccagacggacgggctgctagttggggtggggatggtaaatttattgggtttagaggcgtgcaaaaatgaaggtaaatttgatttttgaaaaagttggagatgttaatagtgattatccatatctttgtgtatataaggagggggagagagagccttttatggagatatcagtgagtaaagaaagaaagattgagtttgttttttattctagagctgataatttttccctaagctctgaagagttctatgaaatatatggtagggcggaagcttttttgcctcaagctttagaaaatgaagattcgctgtaatatttaaataaagagactggttataatggggatttttattttcctgactctagtgttatccggcggcaaatatgagttcgatactttgatttcagagaaatcctcaaagttttagttgaaagaataaaggggcagatttattttctctactctaatttcggcgacggcgcccacgccgaactactcaaagaaaataactcgttaaaccatgcgcccttaccaaggcatcacgaagttcctttacggcatctgcactggagcctttgctcagaagattagagtagagaaagtaaatctttcccctttcaatgttgtttcaagagaagactgtggtcagcaaagagcccacggaagcttaggatgtggttcggatggaagggcggctccgcacgagcataaaattgaatataacgaaagggctatgtaagtaagaaataggctcggatggaaagccggtaggcccttggataccagataggtgattaaatgtctaatgatgtatgtgggtatataaaatatgatggtgtttatccggagtcagatctgcttgagtatttgtcaaaaagtgagctaggtgtttttagagttccaaaggagcatctatataattatccggaagaatttttgcctagtgagaaggattttatttttctgataggcgatgccccaggttatcctaatgctacttatttaatagattatgaggagtatgaccctgatgagtgcgatatagggttttcgccatgtcctaaagagcgtgttcgtatactgcttgggattttgactgatctttcgcttttattaagagcaaaaaaattggttttttctgttactgaaaacagtcaaatatcacatgtaaaaaggatttcaatcgacgatttggattgtgccgttatttcggattttgaaaaatataaatctccacctgataccttgtatgaggttgtgtttaggggtgataaagtgtaaaggaaggataagtaagagaataattctgtccttttttatcaaataatagagtaactgatggagggtggggaatgcgtctttgctatggaattgaagcttcgcaagccgaaggctttctaagtatttttgttttgggagttctttggtctttgaaaaaaggtttcatcaatatagaggatgcagagggtttcatatttaagcctgcgacttcaaaggttgttagagatgagtttggatttgaagagttggcgttattgattgatgctgggtgtgaattggaggatgttaaaagcttggtttttgataagctcgatgaaaatatagatactctgattgaaagggtttcacatatcgtctctgcaaaaacggatggtagaggtttgatagataaaaatatatttctagtaaatgagggcggagaatagagagaataaattaaagtgaaagatctattttccctactctaattttctaagcaaggaggctccagcgcagacgccgtaaggaggctccgcgatgcctaggcaagggcgagtggtttaccgaattatccgcttcacatggtccagcggggacacagtcgccaagtggtattcgccgaggacgaggactaccaacgctacctctccgatcctcaagacctcgaggatgccttcgataacaagctccatgcattttgccgaatggccacccatatccatctgctcctggcggcttgccgaccctcctttctactgccccgtcgcacagcgccccaatgtactagtacaccggaaaccgccgtctcccgttgaacgggcgggccccggccccctaccattcgcagcacaccgacccgcgcaaagggagcgggatgccgcgtaggcaggccgccatggaaggagaagcacatatgccggtactggctctgagactcaccgccctggcggcccttgtgatcagcgtgtcggggtgcgtcatggaggcctatggcagtcgcgcgcgtagcgatgcgcaatcctggatcggcttgccgatccaggacgtgatcaagcgcttcggcgagccggaacgcgtgacgggggatgccgccaggcagaaatacgtgtggaaggagtacgagaactatagccacgactacgactacacctactacgagcagggccatggcaatacgcccaacagctcggtcctgaaccagaagaccggcacggccaaccagagcggctattacacctgcatctacgagttctttgccgacgcctcgggcagggtggtcgatgcgaccgcgcggggtgagtgccgctagttccaggcgctcttcacgccgcaaagggtgattggctcagccagccaccgccttgtctccgacctcgcagagacgcctcagtccagcgcggaggcgtcccctcccctcgctccgccgtgatcgccaggccgccctgcctcacccgggtcctggtccggtcctcgaaacccggccgttgcagccagtagccgcgcaggttgatgcggggcgccaggcggttgccgtcgcgttcgtccaacggtgctccggggtttccccggcgcctcacaacaggatcagcagcgctcctaccagcagccccgccaggctgaagggcagcgtttgcagggccagccgcttgccgcccaccagcacgaccaggccggccttgaccaggctgttgctcagggcggcaagggcgatgccgcggctggccacgcctggatcgagttcgccctgcgccgcgcgggccagggacagggtgatcgcgtcgacgtcggcgaggccggagagcaacgcgaccgcatagatgccggcgtcgccgaacagccgccggccgacctccaccaacagcaggatcgcgctcagcagggcggcgaaacgcatggccgggagcagttcgaaggggttgcgcaggcctggctcgtcgggcgcctcctggctggcgcggccgccgcgcagggcgtggaacagcgtgccgccaaggtagacgagggtggtggcggcgaatggcagggccagttccttcagcaaggccgggtggatcgcgccgatctcgacgaggatgcgcgggaacatcagcgccgaggtcgccagcagggcgcacgccaacagggcgtcgggcatgcgctcgcgcaggcgcgccagggtcagggtcatcaccgtggaggacaccaggccgccgagcaccgcggtcagcaacaggcccttgcgcgagccgatcaggcggatggccaggtaggcggagaaaccgagggcggcgatcagcaccaccatccaccaggtcaggtagggattgaagaacgcccagggaccatagccctggttgggcagcaccggcagcaggaccacggaaatgaacagcagcttgagggtgcccgatagctcctcggcggtcaggcgcttcagcagggcgtggagcttgtccttgaggctcagcagcagggtcagcacgatgccgccggcggcagccagcaggcgctgttcggtgagggcgaggctgccgaggaggaaggtcatcagcagggcgatctcggtggtcatgccctggtcgccgccacgcctgacatcgctcacgtagccggccacggccagcgccgcgagggccagcagcaaggctacccagaccgcgctgcccagttcgcccgcgagcagggtggcgaagccgccgagcaggccggccaggctgaaggtgcggattccggcgatctgccgcgcatcttcgtggtcgcgctcctgccagccgcgctcggcgccgatcagaaggccgatggccagggccgtgcacaggctcaacaacagatccagggaaagcgtcatgctcgattccattcgccgggagagaggatggcgacgtgcctgtacgcaccatagcagcagacgaccccgaggtgcctgcacggcggtacgccgtccgccatgaggccggcgctgccgccggtatccatcgggttctccgccccggtgtaggcgcacgggagctggcgtagggaaagtccgctgtttttcggccgctgacggttctctttccgcgtgctccgacggccgccaacagtaaaaaaaccacggccaatcctgataggcggaggggcgcctcgttcctagactggcggggaaacatcaggagacgtcaatcatcatgcatattcaatcatctcagcagaacccgtctttcgtggctgagttgagccaggccgtggccgggcgcctgggacaggtcgaggcccgccaggtggccactccccgggaggcgcaacaactggcccagcgccaggaagcaccgaagggcgagggcctgctctcccgcctgggggccgccctcgcgcgtcccttcgtggcgatcatcgagtggctgggcaaactgctggggagccgtgcccacgccgccacccaggcgccgctctcccgtcaggacgcgccgcctgccgccagtctctctgccgccgagatcaagcagatgatgctgcaaaaggcactgcccctgaccttgggcggacttggcaaggcgagcgagctggcgactttgacagcggagagactggcgaaggatcacacgcgcctggccagcggcgacggcgccctgcgctcgctggccaccgccctggtcgggattcgcgatggcagccggatcgaggcttcccgtacccaggctgcccgcctgctcgaacagagcgttggggggatcgcgctgcaacagtgggggaccgcgggcggtgccgccagccagcatgtactcagcgcaagcccggagcaactgcgcgaaatcgccgtccaactgcatgcggtaatggacaaggtcgccctgttgcgccacgcggtagagagcgaggtaaagggcgagcctgtcgacaaggcgctggcggatggcctggtggagcacttcgggctggaggcggagcagtacctaggcgaacacccggacgggccgtacagcgatgccgaggtgatggcgctcggtctctataccaacggcgagtaccagcacctgaatcgttccctgcgtcaggggcgagagctggatgctggccaggcgttgatcgaccagggcatgtctgccgcgttcgaaaagagcggaccggctgaacaggtcgtgaagaccttccgcggcacccagggcagggatgccttcgaggcggtgaaagagggccaggtcggccacgacgccggctatctctccacctcccgggaccccagcgttgccaggagcttcgcgggccagggcacgataaccaccctgttcggcagatccgggatcgatgtcagcgagatatcgatcgagggcgatgagcaggagatcctctacgacaaggggaccgacatgcgcgtgcttctcagcgccaaggatgggcagggtgtgacccgtcgggtgctcgaagaggccacgctgggggaacggagcggccacggcgagggactgctcgatgccctggacctggcaaccgggacggatcgttcaggcaagccccaggaacaggacctgcgcctgagaatgcgcggcctcgacctggcctgaccggtcgagggcagagacggacactcccaaggggtgtccgttttcgtttgcgccgtacagcgtcgggcgcaatgggcggcaaggatgcctggctggctgccaccggtgggtggcggacaccggtgcccggcgtcccacctcgattctgcgaacgagacgcagtcagaattctccgagtatgcttcctgcataacgaaacgatcggaataactgtggtaactttgccgcccaccgagatggcctattgatggctcatacggttcgtgcatcgcttcccgcacgattctttcggatttccaaggccggccgggagcgccggttgatcgacgcattcgtatttcaaggaaagaaaacgtggccaccccatttcgcccctcgccttggcgcgccgccgtgccgcctggccttcctcgattttcactacgccctcttttccgcacacgggtcggctagaagccgctccgcgtcgatagcgtttttttccaggagaaccccatgagtcacagcgccaacaaagcactactgccgctcctcgccgtcgccaccctggccggcctggcgggctgcgccaccgagacctccaccgcgttgccggtacagcaggtcgagagcgtcaaccgaccctacagcggcgtgcgttcgccgattgcggtaggcaagttcgacaaccgctccagctacatgcgcgggatcttttccgatggcgtcgaccgcctcggcggccaggccaagaccattctcatcacccacctgcagcagaccaatcgcttcaacgtgctggaccgcgacaacatgagcgagatccagcaggaagcggcgatcaagggccaggcccagcgcctgaagggtgccgactacgtggtgaccggcgatgtcaccgagttcggccgcaaggaagtcggcgaccgccagctgttcggcatccttggccgcggcaagtcgcagatcgcctacgccaaggtggcgctgaacatcgtcaacatctctacctcggaggtcgtctattcgacccagggcgctggcgagtacgccctgtccaaccgcgaggtgatcggcttcggcggcaccgccagctacgactcgaccctcaacggcaaggttctcgacctggccatgcgcgaggcggtgaacaagttggtcaacgcggtcgatagcggcgcctggaagccacagaaccaataatccaccagaaaccagggaatcacggcacacatgagcaagacgatcacatggacggcggcgctgctggggagcatggcgctggccgggtgcagcggaccgaagacgctgtaccagtgggagggctaccaggcccaggtccacgaatacttcaagggtgaatccaaggaggcccaggcgcaggcgctggaagccgacctcgagaagatccgggcgaagaacggcgcggtgccgccgggctaccacgcccagctggggctgctctattccagcatcggcaaggacgaccagatggtccgcgagttcgagaccgagaaggcgctgtttcccgagtcggcgacctacatggacttcctcctgaacaacgcccgtggaggtgcccgttgaaactcgcccgactgtccggcctggtggccggtttcaccctgctggccctgctcggcggctgcgcgccgaccaagagcgtcgactactcggcgttcaagcaggccaagccgcgctcgatcctggtcctgccgccgctgaacgagtcgcccgacgtgaaggcgacctacagcatgctctcgcaggtcaccttcccgctggccgaggccggctactacgtggtgccggtggcgctggccgacgagaccttccgccagaacggcctgaccagcgccggcgacgtgcatcaggtgtccccggccaagctgcgcgagatctatggcgccgacgcggcgctgtacgtcacggtgagcgactacggcacgcgctacatggtgatcagcagcgcgaccatcgtcaccgccagcgccaagctggtcgacctgcgatccggcaccaccctgtggaccggctcggcgaccgcctccagcgaggaaggcaacggtggcaacaacggcggcctggtgggcatgctgatcaccgcggcggtcaagcagatcatcaacagttcggtggaggacgccggttatccgatcgccgggatgaccagtgcgcgcctgctctcggccggccagccgggcggactgttgtacggcccgcgctcgccgaggtacggcagcgactgagccgtgcgccggggctacggggacgtctccgtggcctcggtgcaagccgccgggaggggcttggccgctgcgttgcgcttggccatgtactggcggatcaggtcgtcgagcaacgcccggatggcgcgccgctcgtccagccgcaggcggccgatggcctcgaactgcaggcgcaggtcttccggtagcgcctgccgctcgctgcgctcgcagaccagccagtcgaggggcaccgcgaaacgtccggcgatggtttgcagcaccaccagcgacgggtgcccgcccttggtttcgaagtgccgcaactggctcacggtgacgcccaatcgctcggccatctgccgttgggtcagggcgttctgctggcgtaggcgtaggagattctgcgcgaagctcatggaaaactctccaagtcaggggaaatccttgcctccgccccggtgatgcgggcgatggcggttgtctccatcatcggcgttcgcactcttcgactctgccctaccgttccggcgcgggcctgggaaagctccgggtcgtgagtccgaggtttccccgcgtgccgcctttttcgattcagtagaggctgaagcgacgggctaccgtcccgttggcctgcgtcggcggcagtttggctccgcggcgaagcgataggacgcgagggccttgcgcctggcgaggactagtccgcttgcgccccctgcgccagggcgttgccgacgcccaccagcagcgcccgggtctgcgccacgatggcgctgcggtaggcctcgtagcgggcgtcgctgatggcgttgtcgttgcgcgcgccgccgccgctcgccggtacgccggtgtagtagttgttcatcaccgggacatggatgtgcccggcgggaatctccaggcggaacgcgtcgcgcagcaccgtgttgcggtaggcgctctcgttggacaggtagtcgccgccaccgccgttgcgcgcgcagatccgtcggttcggcgggagcaccagggagggatcgggcatggcgttcatcaccccgttggtcggcacgttttcggtgcgcgggttggcgcaatcggggaagaagtcgtagttggtgtgccaggtgacgtcgaagccttccgcggcctggctggtagcgcccggcggccgctcgatgccgcgccaggtatcggcggcgagcaactggcggaccggcagcgaggccttggagaactgtgccggcaggttctgccgccagcggctggcgctgtcgtagccgagccagcggcgcggcgggttgatattgcagccggagccccgcagggaaatcggcgcggtgccgggattggtcatgctgcccaggggaagcacgtagttgggcaaagcgctgtcggcggggcagtagacgatgccgtcgttgccggcggaggagccgtggaagcggccgttccaggcctccagccagaactggttggcgccgccctggctgatggtgatggaggcgtcgacccggcgcgggccggggcggaaccaggggcccagggtgtcttcctgcatgccgcggttgaacgggtcgtagctgaccggcaacaggtaggcctcgatacgcagcaggctgccgtcggccagcctgaactcgcggccgtccagcgcaagggcggtggcgcccgaggggttgccgttgcgcaggccggtgttcgccgtcccgggagtgcccagggtgaagacgtcgaagccgctgatgatcatccgccggtagcgcgagccgtcggcggcgtagcggcgcggcaggtcgatgtccagctgtccgcgcgaggcgcgttcgaagcgccattgcagcgcctgggcctgggccttgccgaggcggaaggatggcgcccattggcgcagggtgcgggtcatgtagaggcgcgtccagtagagcatgcggtcatcgctggccggcagcgcgccggcgggaatggcgcggcgaccctgggcccggtcgacggcggcgcgccacagcgcgcggccctcttcggtgaccagcttcagtgccttggcgtagctggtgaccggggtgcggccgtcggcggcgcacaggcgcttggcgaaggccggttcgaagccgtcgaagccggcgcccttgacgatgcgctcggccagcggcgtctggtcatgggtgacgacgttggcgccgctgaacggcagcggcgtgtcgagccggcgctcctcgtaggacaacgctgcctcgcggttccaggagcaggcgacgctgggcggcttgcgggcgccggcgaggtcgccgttggcggcccagccggcgccgggcagcagggctgccgagacggccagggtgaagagggagtatcggcttgcgtgacgggcgtagcgcatcgggtggactcctgttcttgttcggttcatgggtcgatcggtgcggcgggcggagcgcgggcgagcggcgcccgccggcggcggggcccgggaccgacgcaaggtgcgtcgcgggttgctgcggtggcggacgcgagggcggtgctagggggcgcgtgtcgccggtagacggaggcgcgcggagggagggttgcgggacgacgcggaggcgtctggggaagtcaggtcctttgccatggatgcaccgatcgttgttcttgctgttgtggggcgtcggtgggtgcacggccggacttcgcacccgtgcggcattcttggaggcgccggcgcggggcgtccaacgaatttatgtggccgccggggataggaaaagttgatggcgaaccggtgccgaagccccctgccccggtactttcgctggcgctgcggcaatccaccgcactggcgcgttcgctcgggctggtctttgctctccggggtccggcggctcgccggcgagtcttgcggtgcgccgcgagcggacgggcgttcggtccttctgcaggcaaatgcccttgttttcggagaaggacacggatcgttgatcgctgtttcgaccaaggaggtcagatgaaaaggaagatgctggcggcttcgctgctgctgtggatgttctcgctgacggcgcaggcggactgcgcggtgctcgggccgggggaagatccctgcgcgggcccggtgctgggaccgaccgtctgcgagtgcccgtgatgaccgactgtaccctcgaccagggacagggagcgttcgattaccaaccaggaggttgcaaatgaagaaagtactgttggctgtgttcctgctctgtggcttctctcttaccgcccaggccgcgtgcccggttttcggcccgtccgaggacccgtgcagcgggccggtgttcggtccgtcgacctgcgaatgcccttgaggtaggtcgtctggcgggcccggtgcagcgggcccgcttccggatgtatcgctcgctcgaagttgccttctttaattctccattccccgcgccgccctacttttcccgctcgtccatcgtcgcgtcgaacgttgccacgaaatcagcgtcgatggacaactcttatattcaatagttgtacgatctgagtttgttgtagtcatttgcttagttggctattcatatgattgccgtaaagcaattataagtttaattggattagccttctaagtctttggaaagagccgtgaacgaccctgtaatatctggttgtagagccgcgtaatgatgtttcaggatatttcattaattttgtagattattgtttttcctttgtttttttaaaaacagctaccagatttagatagatattaattaactcggccacgttttttcctgttctatcattggccttccttgggcgcaggcctgccgaaactgttcatcttcaggtcctcgaaaagttcatacatcgaccgccttgggcgaagcattcgtacgccggaaatctgtccggccgcacggatgttttcagcatgttctctggatgagtttcccgataaacatcaattagaggagtttccctatgtgcggtctcgcgggttgggtggattacacgcgcaagctcgacgacgaatttccggcgatcttcgccatgaccgatacgctcgccttgcgcgggccggatgccgagggcatctggaagcaccgcaacgccctgctgggtcaccggcggctggcggtcatcgacctcagcggcggcgtgcagccgatgtcctatcgctttcccaccggccaggaggtcaccctcgtctacaccggcgaggtgtacaaccacgatgccctgcgcgagcggttgcgccgggccggacatgagttccgcacccgcagcgataccgaggtggtcctgcacgcctatctgcaatggggcgagcgttgttgcgagtacctgaccgggatgttcgccttcgccgtcttcgatggccgcgacggccacctgctgctggtgcgcgaccgcctgggcatcaagccgctgtattacgcgcggcaccgcgagggactgctgttcggctcggagatcaagtccatcctggcgcatccggaattcgccgccaggctcgacgcggtcggcctggtcgacctcctgacgctgtcccggggcacttcgcagacgccgttccgcgaggtccaggaactgctgcccggccacctgctgtcctggcgtcccaattcccaggcgaagttgcgccgctactgggaggtgcgccgccaggagcatgccgacgacctgcagagcaccgtgcagcgcacccgcgaactggtcacccgcgccctgggggcgcaattgcacgccgacgttccggtgtgttcgctgctatcgggtgggctcgattcgaccgccctgaccggcatcgcccagcgcatcgcgaaggcggagcacggcggcgacatcaattcgttctcggtggacttcgtcggccaggccgagcagttccgcagcgacgacctgcgtcccgaccaggaccagccgttcgccctgctggccgcgcagtacatcggcagccgtcatcgcaccgtgctcatcgacaatgccgaactggtctgcgaacgagcgcgcgaagaggtattccgggccaaggacgtacctttcaccttcggcgacatggatacctcgctgcacctgatgttcggcgagatccgccggcattccacggtggccatctccggtgaaggcgccgacgagctgttcggtggctacggctggttccgcgatccgcaggcggtggctgcggcgcgcttcccctgggcctccagggtgcgcctgccggccggcttcatcgacgccggtttcaaccgccgctgcgatctcctccagtaccagcaggccagctacgacgatgggctgcgccaggtcgaacacctggccggcgacagcccggaggagcggcggatgcgcgagttcagccatctgcatctgaagcgctggatggtgctgctgctcgaacgcaaggatcgcctgagcatgtgcaacggcctggaggtgcgggtgccctacaccgaccatgagctggtggagtacgtctacaacgtgccctggtcgatcaagagccgggacggcgaggagaagtggctgctcaagcgggcctgcgccgactatgtcccggaagccgtgctcaagcgccgcaagagcccttatccgacttctgccaacctcggctacgagggtttcctgcgcgggagcgtgcggcgtctgctggaggacgcggcgaacccggtgttcggcatcgtttcgcgagagttcctggccgccgaactggagcatccggaggggtacttcaacacccaggtgagccgccacaacctggagaccgcgctggcgctggaaggctggctcaggttgtacgggctctccgcctgagcgtgacgcggggcgtggcgggttcgggctgctgtccggcccgccggcgtcttcaggcgtcgggcatttcgccgcgttcgccgagccccaccggcatgccttccacgccggcatggaacagcagggcttccaccggttcggccccggctatcaggcgatggatgatgttcatcaggcaacccgccgcctcgccttccagcacccgcgtgctctgggctccgtcgcgggtctccaggcgcagttcgcccttgagcacgtaaagcgcgctgggcatcggatggacctgccagtccaggcgttcgtgggcggccaggctcaggcgctgcacggtgagctgcggctggccaaggggatagccgaggtagagcgagccgttccaggcgcagccgctgcgcagcagggtttcgcggtgcggactggttgcggccgggaggtcgcggctgggtgggaacacatgcacgtggctggggcgaaggtccatcgggcgtcctgcgcttgtcggtgtttttcctcagtcaagccggctttcaccgcctgctccactgccgcttctgctaggcggcagcgggccatcaaggaggcggttggttcatcgcaggcggcggctttctcctttagcctcggcgcatcggcggataacgctgcgcgttatgcgccctacgacttcccgatgagaggcgatgccttctcaagcctcgcggatgaaccgcacgggtacccgctcggtcagccagacgccgttctccgcctggtggaataggtgcccggccaggtgcatgtcgcgcgcgtcgatttccagcagaaccgggctgccgtagcggcggccgacttccagggcgatggcgcggcgggcggagagatggacgtggtggcggctgccggggaccaggccgcgctcgcggatggagtcgaggaagcggctggcggtgccgtggtagagcactgcgggcgggaccgcgggggcgtaggcgatggccaccgcggcatgcgagtggccttgcacggcgcggatgcgctggccatcggcggagagggcgaagcgcttcttgtcgttgttctcgaccaccgcgccgagcagcacgcggtcgagggcgcggccgtcccgcgccgcgccggcgatcagggcgtcgatgtcggcccagccttcgccgtccagcgtcaggccgatggcctcgggctggtggcgaaggacatagctgaggaacttgctggtgtcgtcgagggttttccgatccattccatggtccttgtgcgtgccatcccggcgcgggaacctcaggcgccgccgaggaagtccatcttgcccagttcgacgccgttgtggcggaggatggcgtaggcggtggtgacgtggaagaagaagttgggcagggcgaagccgaagaggaagtcgcggccgttgaagctgatctcctggccgcgcaccttgagggtcacgttgcgctcttcggcgccgtccagttgttcctcgcggatgccctcgaggaactcgacggtgcgggcgatgcgtgcctggagttcgtcgaaggtggtttccgtatccgcgtagctcggcacttccagcccggccagccgcgcgccggcgcccttggcggcgtcgctggcgatctgcacctggcgcgccagggggaacatgtccggcgccagccgggcgtcgatgaagatgcgcggatcgatgttcttcgcttcggcgtgggcggcggctttcttcaggatcgccgagaggttgccgagagtgcgcaggaaggtcgggatcgaagcctggtagatcgacagggacatggacgtgctccagacaggggataaaggtgcgtcgaaggcggcgcgtccagcagtctacccggctttcacgccagcgccagggggcccgcctcgtcccagtgcggatcggccgccatccgttcgaccaggaagtccagcagcgcccgcagcgccggcggcatctgccggcgcgaggcgtacaccgcgtggatgccgagcacctgcggcgaccactccggcagcagcgccaccaggcgtccgctacggatcagcggggctgccgagtacagcggctgctggctgatcccggcaccggcggcggcggcctccagcagcacggtggattcgttggcgctgagactgccacccaccggcacgctggtcggctcgccgtcgcgctcgaactgccagagactgcggccgaagtaggagtaggtcaggcagttgtgcagcgccaggtcctccgggcgccgcggggtgccgtggcggcgcaggtagtccggcgcggcgcagatcaccgagcggcattcgccgaggcggcgggcgatcaggttggggtcgagctggttggcgatgcgcagggccaggtcgatgcgctcctccaccaggttgaccacctggctgttgacctgcaggtcgatggcggtgcccgggtagcgctcgacgaaggcggcggcggcacgggtcagccaggcctgggcgaaggacaggctgctggtgatgcgcagggtgccgcgcgggctgtcgcggcgggtctggccggtggcctgcatggcgtcggccacggcgagcatctcgcggcactgcggcaacagctccgcgccggcgtcggtcaggctcaggcggcgggtgctgcggtgcagcaggcgtgcgccgacccactcctccaactcggcgaggtagcgcgagaccatcgcccgggacatgtccagacgctcggcggcggcggtctggctgccgctgtcgatgacttcgacgaagacgcgggtggcggtcaggcggtccatgattcgctcgatctatgcaacaaagctgtgattattgcggggctttttgcgcgctttcaagcaactaacatggcaagcctctgatcccactgcctggagaaccgctcatgtcgcgccatggattgcttcgttccctgttcgccgccgccgccctgctgggtgccgccggcgtcttcgccgccagcgccgaaccgctgcggctggaggtctacaaccccggcgagaaggcgatcttcgccgtgtcctcggaactgctggtgggccagcgcgaggcgatgctgatcgacgcgcagttctcccgcgccgacgccgagcaactggtcaagcgtatccaggccagcggcaagaccctcagcactatctacatcagccacggcgacccggacttctacttcggcctcgacgtgctgaaggccgccttccccgaggcgaagatcctcgcgacggcgcagaccgtcgcacacatccaggcgaccaaggacgccaagctggcctactgggggccgatcctcaaggacaacgcgccgacgtcgctggtggtgccggagccgctgaagggcgaccagttgaagctggaaggccatgccctgaaggtggtcgacctgaaggggccgagcccggaccgcacggtgctgtggattccgtcgctgaagacggtggttggtggcgtgctggtggaatccggttcgcacgtctggaccgccgatacccagacccaggcctcgcgccaggcctgggtggcgatgctcgaccggatcgaggcgctgcaaccgcggcgcgtggtgcccggccatttcaccggcgaggagccgaagggcctggacggcgtgcgcttcacccgtgactacctgaaggccctggaagccgaactgcccaaggccagggattccgccgcgctggtcgaggcgatgaagcgccgctacccgaacctgccgggcgaggaaggcctggagctgagcgccaaggtgctcaagggcgagatgcagtggccctgagccgcgcccgccgatagccgctgatcgaggcgtcccctgcggggcgtctcgtggagaccgagatgaacgacctcaccctgcattacctctacgatccgctctgcggctggtgctacggcgcctcgccgctgctcgccgccgcccgcgaggtgacgggtctggacgtacgcctgcatggcggcggcatgatgaccgatgccaaccgccagccggtcggcgccggcctgcgccactacgtgatgccccatgacctgcggatcgcccaactgaccggccagccgttcggcaaggactactgcgacggcctgctgcgcgacaccagcgcggtattcgactcggccccgccgaccgccgccgtgcttgccgccgaagcgctcgacggcctcggcgcggcgatgttggcgcggatccagcgtgcccactacgtcgagggccggcgtatcgccgagcgtccggtgttgctcgagctgggtgccgaactggggcttggcgagggcttcgccgaggcgttcgacgcctgctccggcgagccgctgcgcgcgcacttcgccgacagtcggcggctgatgaaccgtctcggcgccgctggcttcccgaccttcgccctggagcgcgacggccgcctgcaggtgctcgacaccgggcgctacctcggccagccggacgactggcgggctctcctcgaaacgcagctgcgccttgccggcggcagcgatgccgtgggcggggccgcggcgccgctctgccgcatcgacggttgcgcctgaatcccgccgccgcgcaggcggactgaacttgtccggctgcgtcgtcctcccatgtagacatgcccgctcgccgacgcgagcggatgtccatccacagctccggaggagtcgacatgaagaagacggcatcggcggtctggcaaggcggcctgaaagacggcaagggcaccctttccactgaaagcggcgcgctcaaggacaacccctatggcttcaatacccgcttcgagggcgcaccgggaaccaacccggaagagctgatcggcgcggcccacgccggctgcttcagcatggccctgtcgatgatgctcggcgaggccggcctgaccgccgaacgtatcgagacccgcgccgaggtcaccctcgacaagcagtccgacggtttcgccatcactgccgtgcacctggtgctcagggcgcgcgtgccgggggcggacgcgcagaccttcgagcagatcgccaacaaggccaaggccggttgcccggtatccaaggtgctcaacgcgaagatcagcctggacgccagcctcgacggctgagcggaacgcttccccagcccggcgaactggccctggcctgccgcagtcgaatgcggcaggatgcgctgcgcagcactcggctgccaggcatcgacgaggagtgacgggtcatgaaaaccatcgggctggggattgccaccttgctgttcagcgccacggcgctggccgcgccgaagccgtgcgaggaactcaaggcggagatcgagaccaagatccagtcggccggggtgacctcctacaccctggagatcgtgcgcaacgacgaagtcagcgacccgaacatggtggtcggcagttgcgagaacggcaccaagaagatcatctaccagaagaacgacgactgagccgctgcgtttcagtacggcgggcagcggctggtctggaagttcgaacgggcgaccacctcgccacgctcgtcgctcagtagcgccagcgccctgcgcaattgcgggcgcacctccaggcgatagcgccggcccgcctcgaagccgtcatagaccacctgctggtagcagttgatctgcaccggctcgccgaagccgccgcccccgccgccggaaccgccatagagttcgtactggaagcgcacctccagcacatggcgtcccggagtgacctggaagtagcgcccgtcgctcaaccgctcgccgtccaggcgctcggccagcagggtgttggccggcgcgctgcgcagctcgacccaggccatctgcgggtccggctgcggcagcggtccggcgcagccggcgaggagcagcagcgcgagcgggacgagacgggtgagtggacgcatggggcgggctccggagggtgttcagctcctagcatagcgccctcgccttgcgccgttcagaccttcgcgcagcgcccctcgcggccgcgcgccagttccctgttgtcctggtcgtagagcttcgcccagggacggaagccgatgtgcccggcctccaggcggtagcgctggccggcgctgaagtccttgaacttgaggttgagctggcaatcgcgccagagcgggctgtccacggggccgatgttggtcgggtcgacggtgaactggtagcgcaccgtgagttcgcgggtgccgggatcgacctcgaagtagcgcgtgcggtcccagctcttgtcgtcgacttccacggcggcgagatcggcgtcgggctgggtatcgaggtcgacccaggcgcggttcgggtcgggggtgggcatcagcagtgagcagccgctcaggacgagcaggccaccggcaagcagcagcgtacgcatagaagactccgaagctcctttaacccggccgccatccgtcgcgccttggaaaaacgccttgcgttcctccgcctcgccggatcgcggaccggtgctggtagggcggcgggcggtccgcgtgctgtgctatgttccgcccatgccacgccgccttcgccatccgcttgctgaccttcgactgccccgttgggttccctgcctggcgctgttggcgctgagcggttgctcgaccgtctcctactacgggcaactggccagcggccagttcgccctgctgcgcgcccgcgagccggccgccgcggtgatcgccgacccgcagcgcgacgcgcgcttgcgcgaacgcctggcgaaggcggaaaaggcccggcaattcgccagcgaacgcctcggcctgccggacaaccgcagctatcgcctgtacgccgatatcggccggccctacgtggtatggaacgtgttcgccaccccggagctgtcgctgcagccggtcacccattgcttccccatcgccggctgcgtggcctaccgcggctactacagcgaggccgccgcgcgcgccgaggcggcgcgccagcgggcgctcggcgacgacgtctacgtcggcggggtgcaggcctactcgaccctcggctggttcgacgatccgatcctcagcagcatgctgcgctgggacgacgaacggctggcgaccttgatcttccacgaactggcgcaccagaagttctacctgcgcgacgacaccgccttcaacgaatccttcgccaccttcgtcgaacaggaaggtacccgccagtggcgcgagtatcgtggactgccgccggcggacggccgcgaggagaagcgccgcgagcagttcaccgcgctggtcctggccagtcgtgcgcgcctcgaagcactttatgccgggccgttggacgatgccgccaagcgtgccggcaaggctgccgaattccagcgcctgcgccgcgagtacgcggcgctgagccagcgcgaatggggtggcgagtcgccgttcaaggcctggatcgacgcgccgttcaacaatgccaagctgcttcccttcggcctctacgaccaatgggtggcggcgttcgccgtgctgttccgccaggtcggcggcaactggccggcgttctatgcgcgggtccgtgcccttggccagctccccctggcggagcgccaggcggcgttgcagcggctggccgccgcagcgccctgacgcctgctcaggcggcgagctggtcggcgtagcaccagcgcgtggccagccggccgatcggccagagcagcgccaacaggccgacgccgagcagcgccaccagcagcgtatagccgatgccagcgggcgccaggccgaggatcatcagcagcgccagccccccgccgaccgccagcagcgcgacgctccagagcagcatggcgaccaccgcgagcagcagcgcgcggccggcggcgaagcgttgcaggcgcgccggcaggcgcgtgcagacggcgccgaagagcagcgccgcgggcaacgccacgccgctcaggtacaggccgtatagccaaggctcgtcgtagcgcagcagggcgtagggaaggaactgcatcagcttgaaacacagcgtggcgaaacacagcgcggcgcccagggcgacctgccaggcagcgacgcgggcttcttccccttcggccaggcgcggcgagttcacccggctgccgagcagcaccagccccaacggcagcaggctgcccaggagcaggtagacccagctcatcgcttcgttgaacgccatcagccagacgccgtagctggattgcgccgtcacccactggtagaacggcagcgtcagcggcgccaggccgatcccggcgagcatgccgcagaccaggttgagcagaccgtagccgatcagcagcagcgccagcgggcggaactcgacgagctgccgcttctcgcggtaggcatgcagcaccagcaggttggccgccgcgtagaacaccaggccggtgaaccagtgcggcgccatcagttgcaggtgctcggagaaacgctggcggatctcgccgatgtcgttgtaccactggatgcccaggctcacggcgaaggacaggcaggtgaccagcgccagcaccgcgatgaacgcatagggctgggtggtggcgggcacctctcgggccggcggctgcaccggggcggtgggggtggcgaagggattgtcggtcatgtcaggcgtccttgtctgaaacggagcatgggtcagtgggattccaacacctgccgcagggcggcgaggtcggcgcagtaatgggtcggctggtgcgcgcgcagttcgtcttcgctgccgaagccgtagccgacgccgatgcaggcgacaccgttgcggctggcgccgagcaggtcgtgcatgcggtcgccgatcatcaggcaatgctccgctgccaggccttcgctgtcgagcagatggcggatcagttcgtccttgtgcgtgcgcgtgccgtccagctcgctgccgtagatcgccttgaagtgacggtcgaaggcgaagtggcgggcgatctcgcgggcgaacacgccgggcttgctggtcgcgacgtagagcgtgtggccgcgtccgaccagggcttcgagcagctcgggaatgccgtcgaacacgcggttctcgtagagaccggtgaccctgaagcgctcgcggtagtggttcaccgcctcccaggcgcgcgcttcgtcgaagccgtaggtctgcatgaagcactgcaacagcggggggccgatgaagtgttccaggcgcgccaggtccggctcgtcgatgcccaggcgggcgagggcgaactgcaccgagcgggtgatgccctcgcgtgggtcggtgagggtgccgtcgagatcgaagaggatgttcgggtagcgcagcgtggcgtcacgcatggtagtcctcggcgatgtgcaggtccttgagcttcacgtagttgccggcggtgtaggtgaagaagccgcgctccttgtcgctcagcggacgggccttcttcgccgggctgccgacgtagaggaagccgctctccagcaccttgcccggcggcaccaggctgccggcgccgaggatcacttggtcctcgatcaccgcgccgtccatgacgatcgagcccatccccaccagcacccggttgccgatgctgcaaccgtgcagcaggaccttgtgcccgacggtcacttcgtcgccgatgctcagcggaaaaccgtccgggttgaaggggccggcgtgggtgatgtgcagcacgctgccgtcctggatgctgctgcgctggccgatgcggatgcggtgcatgtcgccgcggatcaccaccagcggccagaccgagctgtcggcgccgatctcgatgtcgccgacgagcacggccgagggatcgacgaagacccgctcgccgagcagtggcgttttgccctggtaggaacgaatggtcacgatagttttcctcaggctgcggatgccgccgattgtatttaagatggtcgggtatttccttagccaaggttgccaacgtgagcgcgaatccccttctgcaggcctacgacctgccgcctttctcctccattcgcccggaacacgtgaagccggccatcgagcggatcctcgccgataaccgcgccgccatcgcccgcctgctggaaacccagcgcgagcagccgacctggaagggcctggtgctggcgatggacgaactcaacgaccgtctgggcgccgcctggagtccggtcagccacctcaacgcggtgtgcaacagcgccgagctgcgcgaggcctatgaggcctgtctgccggagctgtcggcctactccaccgagctggggcagaaccgcgccctgttcgaggcctacgaggcgctggcgaagagccccgaggcggccggcttcgacgtggcccagaaaaccatcctcgaacacgccctgcgcgacttccgcctgtccggcatcgacttgccggcggacaagcagaagcgctatgccgaggtgcagtcgcgcctgtccgagctgggtagccgtttctccaaccagctgctcgacgccacccaggcctggaccaagcatgtcaccgacgaagccgcgctggccggcctgaccgattcggccaaggcccagatgaagcaggccgccgaggccaagggcctggacggctggctgatcagcctggagttccccagctactacgcagtgatgacctatgccgatgaccgcgccctgcgcgaagaggtatacgccgcctactgcacccgcgcctccgaccagggcccgaacgccgggcagaacgacaacggtccggtgatggaagagatcctcgacctgcgccaggagctggccggcctgctcggcttcgccaactacgccgagctgtcgctggcgaccaagatggccgagtccagcgaccaggtgctcagcttcctccgcgacctggcggtgcgcagcaagccgttcgccgcccgcgacctggagcagctgcgcgcctacgccgccgagcagggctgcaccgaattgcagagctgggacgccggctactacgccgagaaactccgcgaggcgcgctacagcgtgtcccaggaggcgctgcgtgcctacttcccggtggacaaggtgctttccggcctgttcgccatcgtcgagcgcctctacggcatccagatccgcgaactgcacgatttcgaacgctggcacgccgacgtacgcctgttcgagatcctcgagaacggcgagcacgtcggccgcttctacttcgacctctatgcccgcgccaacaagcgcggcggtgcctggatggacggcgcccgcgaccgccggcgcgatgcccagggccggctgatcgacccggtggcctacctggtgtgcaacttcaccccggcggtgaacggcaagccggcgctgctgacccacgacgaggtcactaccctgttccacgagttcggccatggcctgcaccacctgctgacccgcgtcgagcatgccgccgcctccgggatcaacggggtggcctgggacgccgtcgagctgcccagccagttcatggagaactggtgctgggaaccggaaggcctggcgctgatctccgcccactacgagaccggcgaggcgctgccgcaggacctgctggagaagatgctggcggcgaagaacttccagtccgggatgatgatggtccgccagctggagttctccctcttcgacttcgagctgcacgccacccacggcgacggccgcagcgtgctgcaggtgctcgagggcatccgcgacgaagtggcggtgatgcgtccgccggcgtacaaccgcttcgccaacagcttcgcgcacatcttcgccggcggctacgcggccggttactacagctacaagtgggccgaggtgctgtccgccgatgccttctcgcgtttcgaggaagaaggcgtgttcaaccccgataccgggcgtgccttccgcgaggcgatcctggcccgcggcggctcccgcgagccgatgctgttgttcgtcgatttccgcggtcgcgagccgtccatcgacgccctgctgcgtcactccgggctggtcggggaggccgcatgagcccggcgatcaccaggaagcgcttcatcgccggggcggtctgcccggcgtgcagcgaacaggacaagatccagatgtgggaagaggacggcgtgccgcaccgcgaatgcgtggcctgcggctacgccgacacgctcaacgcccagggccagtcgatcccgaaggagctgggtacgcgggtcaaccagaacgcgccgaagccggccaacccgaaggtgcagtcggtgcagttcttccccaatcccaagctgaagaagaagcccgacgcctgaccgctcgccgccgaccggcggcgatggctgtgggccggggcccggtgcgatactgtatccatatacagtatttcgccgggtttccctcatgagcgctcccctgcccccgcgcggtcgcggtaccgccagcaaccccctcaaccgcttcgccccgacccacagcgaggccttcgacgatggctgggagcaggacgtgccgccgatccagctcaccgaggtgcgcgaggagatcgcccgcacggtgatctcccgcaaccagtcgccggacctccctttcgatcgttcgatcaatccctaccgtggttgcgagcatggctgcatctactgctatgcgcggcccagccatgcctattgggacctctcgccggggatcgatttcgagacccggctgatcgccaagagcaacgtcgccagcgcgctggagcaggaactgagcaagcccggctatcgctgcgcgccgatcaacctgggcgccaataccgacccctaccagccgctggagcgcgaacgccgcctgacccgccaggtgctggaggtgctgctgcgcttccgtcacccgctgaccatcgtcaccaagggctcgctgatccttcgcgacctcgacctgctgcgcgaactggcggagcagaacctggtggcggtgatgatcagcctgaccaccctcgacgacgagctcaagcgcattctcgaaccgcgcgcggcggcgccctcggcgcgactgcgggcgatccgcacgctcagcggcaacggcatcccggtgggcgtgctctgctcgccgatgatcccgatggtcaacgacatggagctggagcgcctgctccaggcggcgcgggacgccggcgcgcgcagcgccgcgtacatgctcctgcgcctgccgcgcgaagtcgccccgctgttcgaggaatggctggcggcgcactacccgcaacgcgccgagcatgtgatgagcctggtccgccaatgccgtggcggcgaggtctacgacagccgcttcggccaccgctttcgtggccagggaccgttcgccgacctgctggcgcagcgtttcgcggtggcgatgaagcgcctcgggctggaccgccgcgagggcttcgggctggattgcagccggttcgccgtgccgggggcgcagatggcgttgttctagcgttttccccgcggtgcagcatttcgtatagggcggagtagcggcggagcgtgccggtggcgatatccgccctgcgggaagaaccgctgccgccgggaagccggaaacgtcggaagcagccgtcccggcgaacgctcgaccttcaggccggtcgggtcagcgcgccagccccctcaacgaaacggcgacccgaaggtcgccgtcgcgttcgtgccggtaacgaggccgatcaggccttggcgcagctcggcggcgcccagtcgcccatgtccgggctgttgcagacttcccggatcatgccctggccctgggaggccaccttgttgccttcgctttgcgcgtcctgggccttgcggatggtctgctcggtggcgaccgcttccttcggcaccttgggattgctgccggtcttgggcttgctgccgcctttcgtagtgctggcgcggttctcggcctcggcgaccttggtcacctcggcgcgcggtacgccgacctgctgcaggtctttctcgtaggcctgggtgtagttgctgatgttctcgccggcacggccgttggcggcgaccagcaaggcgttggtctcctgcaggccgctgacgatctcggccaggcgcttgcgcccttcggcttcgttgatcgacttgttcttgcgaccgtcgagcagagccttgaactggctctggtagcagctttgcgccgacttggcgtaggccacgctacggttgatctcgacggtgctgcggtcgacgtcggtaccgtaggagccgatgcgcgcgcggtcatcgctgatctgcttctgcttctccatgtagtagcccgccgcgccgccggccagggcgccgcctgcggcagcgagggcggcattgcggccgcggttctcgtcgctggccaggccgccggccaggccgcccaggaggccgccggtaatggcgccggtgatggccgaattgcgcactgcgttatcggtgctgcgcaggtgcgacaccggctcgtagcaggacgggtagtattccgcgcgggtggtctgggcgaccgagccgacgccgctgctggcgcagccgctgagcagcacgccgctggcggtcaacaggcagagcgcgtagcgcgccgaggtgatcaaacggttttcgctgggttggctcattgcatctcactcctggtttgatgaaccgcccggctgccgagaggggccggacggaactccttcaacgcccgctggacgcgagcaattccttcaataccgcctccggctcggcccggtgctgctggcgataatctccgacgtgtttgacgaacagggtcgcgcgcttgaccaggctcttgcccagaaccgggttgcgattgagttcttcctggatgcgctggaactgcgcctggatcaccgcgtcggtgtaacgggtgccggtggcgaggttgtcgatgtagatggccaatgcgccatcgagggcgctgcgcccgttggcgatggcgccggcatagagctgggcggtcgcctgatccctggctgccacggctttctccctgtccttcttgaggttggtcaggcgtatgttgtagttgttgatcgtctcggcgaccagtgccgccgactgtatcaggtttccggcggcctcttcgcgctgccgggcgatcaacgaaacgttacgcttgagttcctcgtttatctgggccaactgcgcctgcatctgcgggtcgcgggtggcggcaatgattccgtccaattgcttggtgggatcttgagcgtcatcgatggcatcggtcaatgccgctagtcggccttccttctgccattgggcgaacagctcgggatagcgcgagcgcggcgcggacagcgcgccgatggcgacacggaaaccggtggtctcgttgcgctgttcgctgccgtcggcggcgaacagcgggtattcgcggcgcatcccggtgaatagagtcatctcgccttcgagatagttcccgcccttcaccacgaaaccgccatatgtgccctgccggcgaccggcgtggaccagttggaaggactcctggaccatctccgcggcattgccgatcacgtcgaacaggcccagcgggttcggccgcttcatccctaccggcaacagtcgcgcggcctgcccggtgccgccggcgacctggttgtacaccgcccagtcgcccagcgggccttcctggtcgctgccctcgaccttgcgcgggaacagccggccttccagttcctggcggctgaccgcctggccgccgcgcgcggcgaactcccactcgacctcggtgggcaggcggacgaagccgatgccgccgtcctcgggactcttgccgcggccgctgaccggcagcagttccgggtggttcttcagcagccaggcgctgtacaccgcgccgaagcgttcggcgtcgaagcgcgagaggttgaccttgggcagccgcgcggccatcccgtccggcacgtcgcaggccggcgcctcgccctggccggagagcgcggccgcctggctcatcaccgcggcgtactggcgggcggtcacctcgtacttgccgatgaagtacagcatcggcttcagcggggtgccggcggcaggcttcggcaggctggcggagagcttctgctgccaggccggtgccaggtcggcgaggctgaactggccgttcacgtagtcgcgccggtagccggagatgaacgactgctggtagcccgcctcgccttcgttgaaggcgtagccgaggttgacctcgcgatcgtcgagggcgccttcggcgagtacgtagacatgccggaagaccatctcgccgccacacggcagcggcagggcgacgtcgtcggccagcggcttgggattgtccggcgagtcgccttcggcccaggccggcgcggcaaatgccaggcaggcgccgagggcgagcggaagaatggctttctcaaacatcgcgtaatccctctgcggcttcgatccgcgccgcgcgccagccgccgctggcggcggccaggacgctgcacagcagcgtggcgagcagcgccgtcaggtagtggctgggcagcaggcggcagacgaactcgccgctctggttgtcgaacaggtggttcagcgcgccggccgtggcggcgtacagcagcccggcgaggaacaggccgaagacggcgctgaacagcgccaggagcatgacgaagccgaccagcgcggcggtcgggaagcccagcagacgtagcaccgccagggcgcggcgcttgcgttcgacggcggccaggctgctggcggcgatggcggcgaaggcaccgccgatggccagcgcggcgacgatccagaacaccaggccgaggttgcggctgaggctgcgcacctgggcgatggcctcggcctgggtggcgacttccacgccactcgcgacgaagtgccggcgcagcccttccaccgcatcgaggtctcgggcgtacaggcggaagcccgggtagatgcgtgcgcgcggggtctcgccggccttccccggccagccgtaggcggccaccgcgcgaccgtcgcgatagtcctcggcggcttccagcagggccagcggggcgaacagcgcgtcgcgggcgaaacgctcctgcggcagcaccgcgagcacttccagctccaggcgctggctctgtgcctggccatccatgcgccggccgatgcgcgcgacgatgcgctcgccaggctgggcgccgagtttttccgcggcgccgtggctgagcaccacgcgggtcggccggtcgggttgcggcaggccggccagcagcgggtcgccggcggcgctgggaatcatctcgacgctcagggcggtctcgccgccgccgctgaggtcggcggtggcggcgatctgccgggtgcgcggcacggcgaaggcgacgtccgcgcgtgcggccagggcggcgatgtcctcggcacggtagcgggcgccgccgaccggaatgatctcgcgcacagaaggcgcgcgctccagccgctcggtgagggtgctgaccaggccgtacttgaggccgaacagcaccagcagcggggtgatcaccgccgccagggcgaagatcgcgcagagcgacaggcgcgcctcgccgcgatagtcggcccaggccagcgagagcagcaggccggcgcgcatcagccaacttcctcgaggcaggcgccgacgctgtcgtcggcctcgcgttgccagcggatggccaggacttccaggccggctgcgcgagccaggcgctcgtcgtgggtggcgaccacggtgcaggcgccgcgctcgcgggcctgctccaccagcaggcgcatcacccgttcggcgttcagcgggtcgagcgccgcggtcggctcgtcggccagcaacaggcgcggcgcatgcaccatggcgcgggcgatggcgacccgctggcgctggccgaccgacagcgccgccggttttttgtccagctggtcgccgatttccagccgctcggccagcgcctgcacgcgctcggcggacggggcgccgagcaatgtgcagggcagtccgatgttgcgccgcacatcgaggaactcgagcaatccgccgctttgcagcacgtagccgcagtgctgccggcgcagcgccgccaagcggtcctggcggccgtcgcgccagagcgcggcgatgtcctgcgggcgttccccggcgaggaattcgaagcgcccgcccgggtccggcgccagggccagcgccagcaggtcgagcagggtgctcttgccgcagccgctggggccgacgatggccagctggcgacccgcgcgcaattccagcgccggcacccgcaggcggtagcgctggcgaccggcgccgtggctgcgggcgacctcgtgcaggcgcaggatcatggcagcgtcgacagcggcacgcggtacagcgcgtcgccggcgtcggcgtcgccgaaccggacccagttggcgacgtcgttgtggaaggtttcgtagaggcggatcttcgactccagttcgtcgatgaagtcctgctgttcggcgacgctcagcgacagccagaggtcctgggtcatgttcagcgacttgctgcggtacggcaggccttccaggtattcgccgagcacgccgctctgtgccaggttgctgcccttcaccagttgcgccgggtcgcggctcatgtaggcgctggcgctggcgatttcctggaagaagtccttgggcgaggtctgggtacgcttggccgcgtcgacgatcagtttcagcgactgttgcagttcgttgagttgcagcttgctcagcagcacgcagacctggaacgccggcagcgccgggttggtcaggtcacggtcggcggtccaggcggtgacgacctgcggcgcgcgcaccgggtcgcggcgaccgaggaattccatctgcatggcgtagccgatggccgccgacttgctcgccacgcttggcgcggcgtcgaagcgcggcgcctgcggcttgcggttgccggcgtcgtggaccaggtcggcgaacaccgtgccgatctccttcaccgtgttgccgaaggcgttcacctcgccgccggccaccgggatgtagaggtcggcgatcttcgggttggcgtcggcggtgaggctgcggtactgctgctcggcgtagccgtggttgttcttcccggccggggtgcgcaggtgcagggcatagatcttcacgcccttgcgcagcgccgcctggcggacctcggcctcgttcatctgggtgcgcccgagcgggtcgttcttgcgcagcgcgccggcgtcggtgaccagcagcaccacgcgcccggcgtagggcgaccagtccatttcgtcgaccgcctgcatgatcccggcgaaggcgtcttcgttgaacgagtggctggagacgtcggtggcgcgcacctggctgctcaactcggcgaagcgctgcgcgtcgttgcccggttgcagcggcaccagggtcttgctgacgtattccaggccgggggtcttgtcggtgttgttgcggaaaccgaccaggccgaagctgaccttgtccaggtcgccgcgctcgccgatctgccgctgcaggccgtcgatcacctcgcgcacgcggtcgatgtagggctgcatcgacaccgaggtgtccaccaccaggacgatgccggtgcggaaggtgtcgctcgccgcgccgctggcgccgccctgcccggcctggcccggcgcctggggtgccgcggcgctgccgccggggtcgatcgaggcgacctccagcaactgcgccggctggccgtcggcgtcgaagctttccttcgagtcgaagatcggcagcaggtagaactggtcctgggggatcgcccggtcgttgggctcgaccgcgaccacctgcggatcgcccttgtgatccaccgcctgggtcagggtatcgcgcgctgcgcgggtatcgccgagcaggcgctcgacctgctcggcgctgttgaggaacatcaccggcgcgcggccggagcgttcggtgaacttcagcaccaggctctgcttccagtcgctcaccgcgctggccggcagccagccgtcgccctcgccgttgctggaggcgccgacgcgcagccaggggctgccgccgacctgcttgcgggcgtacacgtagagcaccgagaaggccggcaccgcgccggcccggggcgggccgccagcctcggcggagatggccgcgccgggtttggtcaggacgcgctggaacagggtcttcttgcctggcatcagcagcggacgctcgccgccgtcctgttcggcatcggccaccggggtctgctgctgcggcttgtccgccggcgtctgtcccagcggcgctggatcggcagcgctcggcgcgtcgcccgagctcagcagccaccaggcgccgccgccgatcgccaggagcacggcggccgcggcggcggcgatcagcggcgtgcggctgccgccggcacgcggcttcgccggtggcagcggaggcggcgggggcgatggcggtttcgccgcttgcgatggcggaggcgggggcggcgtggcgccgccggcgctgggcgtgaccggcggcaactggatcgataccggttgcaggccgccgaggtcggcgggcggcatgggcgcgggttcggccggcggcgggttgctcgctcgcggcgagccctgcggcgtcgccagcggacggatctgggtggcttccagggcgctcggcgccaggcggtcgagggcggcgatcagcgcgccggcggtggggaagcgctcggccgggtccttggccagcaactggcgcaggatgtcctggtagcggccctgctcgatcggcagttccggtagcggctcggtgaggtgggccagggcggtggagagcgaatccttgccgttgtagggcagcttgccggtgaggatctcgtagagcaccacgcccagcgcgtagaggtcggcgcggccgtcgatctcctgcccgcgggcctgctccgggctcatgtagctgggggtgccgacggcgaagccgacctgggtgaactgggtattgtcctcgatcgacttggcgatgccgaagtccgagagcaccgcggtgccgtcggcgcggaacaggatattggccggcttcacgtcgcgatgcaccaggccctgggagtgcgcgtagccgagcgcggcggccacctgccgtacgtagaccaggcccagctcgggatcgaggccctgctggatgcgctccttgagcgtgccgttgggcaggtattccatggccatgtagtagcaactgccgacgttgccgatgtcgtggatggtcaccgtgttcgggtgcgacagccgcgccagggtccgaccttcgcgcaggaagcgttcggcgaagctcgggtcggcggctagcgccgcggccatcaccttcagcgccaccttgcgctgcagcgagcgctgggtggccaggtagaccgtggccatggcgccttcgcccagctcgcgttcgatgtcgaatcccggaagttctatgtccatgtccgtctcagaaggccctgaccaccagggccgtgatgttgtccggggcgccgcgggtcaggcccaggtggaccaggctgcggaccaccgcatagggatcgctgtggctgagcacgtcgcgcagttcgctgtcgtcggcggtcttgttgaggccgtcgctgcagagcaggaagctgtcgccgggcagcacgtgcagcgcggcttccgacagttccagttgctcgtgcacgccgaccgcgcgggtgaccacgttggcgcgcggatggtggcgcgcctcttcctcgctgatcaatgcgttgtcgagcagctcctggacgtagctgtggtcccgcgagatggcttccagcacgccgccgcgcaggcggtacaggcggctgtcgccggcccacaggcagctcgcctggttgccgcgcgcggcgagcagtaccagggtgctgcccatcacgctgacgccacgcaggccggcctcctggcgaacccgctcgttgacctgggcgaggccggtgcgcaacgcgccgacataggccggtagcgaggaggccgccgggatgcgccgcagggtatcgacgatcaggctgctgacgaagtcgccggcggcgtggccgcccatgccgtcggcgaccacccagagtcccgcctcgggggcgtcgagactggcgtcttcgttgaccttgcggaccatgccgacgtggctgtagctggccgacctgtagtagctgactgagttgggcaccatcagttgtccttaaccgggtatgccgggaaagagcgggatcacctcgccctctccggtgaggaatcgtccgaacgccggcgccggcggcaggccctggtagcgcatcaggccggcggagatccgtgccgagccgcgtccccaccagtggctggcgccgtcgcaggcgtgctgggccagcgcggcgaggcgctgcgccggggtcaccgcttcgctgcgcagcaggttgccgctgatcagcgattgttcgatgcgcggtccgcagggcggtgccgggagctgcgccaccgcctgctcgaaggcctcgacctcggcctccggttcgagggtggagagcagcaggctctcgacctgttcgaaccagccgtcgtcgccgccgaccagcccgccgaggtcggcgttcgccggtagcaggcaggcgacggtcagcgggaaatagcgaccgacccggtcgatgctcggcatcaccactccggtcaccgcttcgccgccgagcaggccgggggcgatggcgaagcgccacagcgggctggtcaggtaggcgtcgagccaggccgcgccgagctcgtcctggctggcgcgcatgccgctggccagccaggcgtcccagggttcgacgaaggtgttcggcaggccgcggctgacgaaatcgccgcggccggccagcttgccgtagaaaccgacgctgttcaaaggcgctccgggaggctgaagccggacacgacccggctcttgaaggggttgaaggcgctgctggcgcgcagctcgcaggcgatgctggagccgtcgatgcgcagccgcagggtgaagcggtccggcgagttgccgcgttccaggtccgactggtcgagcaggcggaaccaggcccaggggccttccagggtcaggccggaacggccgctgctgggcggcggcgtcaccgtcaggcggaccacgccgaggccgttggcgctcggccactgcatcgccaccgggcggctggggccgtggtcgtaggtcagctgctggccgtcgaggtcgaggatgaactggctgatcgccgcgtccatggtcaccggcttgagctcgaagcgcaccgtcggttgcatgccgccggagcggaagaaggcgtcgcggatcgccgctgcgcgctggaaagtgtgcagcacgccggggttgatgccgagcttctgcgccgcgccgggctgccagcgccaggtgctggcggaggtgtcgacgtagggttgcaggtactggcggaagtagctgtccatcaccccgccggcaccgaagaagtggccgaagtcttccagggtggcgtcgcgcgaactgccggcggcgatcgggtagcgcccggccagggattgccggtagacgctgaccacgtcgctgatccaggccgcgttgagctggttgcgcacgctgcccatcatgctgctggtggtggagttgaccacgttcttcaccaggccctggaccaccggcggctggcgctcggcgctgagggccacgcgcgaggcggcggcggccacctggttcttggcgtcgccgagcagcgagtcgccgctggctccggccatggcgctgacctgcacgtagagcgcgttcatgtcttccagcaggctgtcgatcggcgccggctcgttgccgccctcgcccttgctgaccaggctgttgagttcggcgaagtgggcgctgatcgggtcgctgtcgacctgccgcggctgttcgcgggcgccctcttcctcctggccgaccagcgagccgaggcgctgcttgagcttgtccacggtgccgtcggcggccttcttcacttgcgcggcgaccagccggtcgcccttctgcaggtcggtctcgcgggccactgcctcgagcagcttgcggaacggcgaggtcggcccggagagaatgcgcagcacgtcggcggcctgggtgacattggtgatcggcaccacggtgaggtcggcgagcaggtcgtcccactgccgcaggtagtcctggaaatacaggcgacgcacgtcgagggccaggttggcggcgtcgccggcatcgttcaggtcgcgcccgagcacccactgttcctcggcgatggtgccggcctggctgaggctggcggtgaggaacacctcgcgatagccgcggtaggtgaagaagccgctgagcgggtcggtgagcggcttgccgctcttgcgcgcgaacaccagcggcgcgtcgcggccggcggcgtcgctgatgcggaagtcgggcacgtccttgggcagcctctgccgcttgacccggtcgtagacccgctgcgccaccggcagttgctgcaactggcggcgcaggtcctcgaccaggtcctggtccaggcgcgccgacggcggccgtcgttcgagcaacgcgtcgaggtgcgcgtgcagcgcctggcgctgttccggcgagaggtcgcgcggcaggttgcgttcccagtcgaggctgatccaggccttgatgaagtcggcgtcgtaatggtccgggctgccgagcatcaggtaggccttcaggccctcgtagaggaaatcgctgctgccgccggagcgcaactgttcctcgatgcgggtcaccaggcgcggggcgaacaccgcgatcagcagcttgcggtagacgctggcggactcctcgccgagcatgtcgccctggtacagcccgtagccttcggcccagctcggcgcgtcgccggcgagattctgcaccgcgttgagctgtggcagtacggccaggacgtcgcgctgggccgggctcagcgactcgatgccgcgcgccagcgggtcgacgcgctggtcgaccgcggcgatgtagctctggttggcgcggtagctggcgatccataccgccgtcaccgccagcaccaccagcgcggtggcgctcagcgcgccgatggtcagccacttgcggcggcgctcgaccttcgggttggtgccgaccaggccgcgttcgccgaacgccacttcgcggaacagccgctcgatgaagtagctgcgcccggttccggtctgccgcgccaggtgctggcggtcgaggttcatcgactgcgccatgctgccgatcaggcggtcgatcggactgccttcctgggttccgctggtgaagtacaggccgcgcaacagcgggcgttcctcgtaggggttgggcttgaacacgccgttgaggaactcgccgaggcattcgcgcagggcggcgaattgctgcgggaagccgtagaccaggtcgcgccgcgccgggtcgcgctcctgctgcaggcgttccaccaggcgcgcggtgagacgctgttcgagcagggcgaattcgctgtcgaacaccgccagcgggccttccgcgctcttgccgtcgtcgagggcgaaggtcatcccccagacctgcgcgcgttcctcgcggttcaggctgtcgaagaactccatgaagcccggcaccaggtcgaacttggtcagcatcacgtagatcgggaagcgcaccccgagctgctggtacagctcctggatgcgtgcgcggatcgcctgggcatgggcggcgcgctcggcgtcgctgcccagcagcaggtcggaaaggctgatggcgatgaacgcgccatcgatggggcggcgcttgcgctgggtcttgagcaggtcgaggaagcccagccaggcggccttgtccacctgggcgtggctgtcctgggtggtatagcggccggcggtgtccagcagcaccgcttcgtcggtgaaccaccagtcgcagttgcgcgtgccgccgaccccgcggatcgccccggcgcccatctgcgcggcgagcgggaagtcgaggccggaattcatcagcgcggtggtcttgcccgaaccgggcgggccgatgatcacgtaccagggcaactcgtacaggttgcgccgctcgctgccgcccaacttggcccgcttgagcagggccagggcctcgtccatgcgttgcttgagggtcgccagctcttcggcggtggcgacgctggcggcgtccggcgcgctgacctcggcgagactctgcatgaccttcgccgcgttgcgccgggcctgcacgatgcgcagcacgcggaagccgatccagaccaggaacagcaggacgatcagcacccagcggctggtcgccgaggccaacggttcgtagttgcccaggcgcagcagcgggccgaggaaccagatgatcaggctcagggcgagcaggccgagcaccggcaccacccagcgcgcgaagaagttgaggaagcctttcattgcgcgccctccgcgaatacggtgatttccacccggcggttgcgtgcgcggccttcggcgctggcattggtcgccaccggctcggtgtcgctgcgcccttcggcggtgaagcggccggcgtcgccggtggtcgcgccgagcaggtcggcgacctcctgggcgcgggcctgggacagtttccagttggacgggtagcgcagcgtggcgatcggccggttgtcgctatggccggtgaccagcacctggcccttgaccttgcgcagggcgtcggcgatgcgcagcagcagcggctggaactcgtcgcgcacgctggcgctggcgctggcgaacagctcgtcgccgcggatggtcaccaccgagcggtcgacggcgtcctccaccgccactcgctgggccttgatgtcgtcggcgaggaagcgcgccaggcgtggccgctcgatcacccgcggctgcaccgccgggcggtcgatggcctgcaccgggatctcgccgatggcgtggatgcgcttgaacaccggctcggcgtcggcggccagcttcatccgcaggccgaacagcaaggccagcagcaaggccaggccgatggcgataccgacccacggcggcaggtattgcgaaaggcggtctcgcatcacgctgaggccgcgccagtgcggcgacagttcgtgctcgtactcgccgcgggtgctgcggatcaccgccgcggtgcgctcgcgcagcgcctccagttggctgcggccgtcgtgcatgacccggtagcggccttcgaagccgaggctggtgcacaggtacagcagctccagcaggtgcaggcgctggtgcgggttctgcaggcagtgttcgagcaactggaagaccttctcgccgccccaggcctcgttgtgcagggtgatcagcaggctctgcttgccccagtcgctggtgctgccccacggcgtgctgagcaccgcttcgtcgagggcggtgcagagcacgtagcgcgccagcatcacttcgtccggcgccacgccggcctggcgtgccttctcctcgaactggcgcaggtagccgagcagttgcgcgcgcaggctggccggcgccggatgggcgatggtgttgcgcaggcgggtgagcatcgccagcagtgggccggcggcctgctccagcgggttgaggccgtcgccgcggccgctcagcggcgccaggctggccatcggcggcggcgtgtagggatcgccgccgcgggggccgccggccggttccggggcgcggccgccgggacgcggcatgatcatggtgcggtcgtcgggcgggcttccgttgccgccgccggccggggtgccgaagggatcgtcgatgggaggcatcgttgcttatcctcgaatggcccagaaggccaggttcagcccggggaactggccggcgatgtggaaggcgaagccgccggagtgcgtcagctgcttccaatgcgcgctgccgcggtccagttcgaaataggtggagccggcgtggtaggggatctgccgcggcgccaccggcatcggcagcaggccgatacccggcagttgcaggttgaccaggtcgcggatgtgctccaccgagccgaccttggcctgctgcgggaagtgcccgcgcaggctctcgccggggacgtcggcgcgcaccaccaggacgaagctggcgttgtcgatcaggctgcggtcgctgagcatcgcgacgtgcacgccgtaggccttctcgacgatcgggatggcgatcgccttggcgtcgatcaccgtcgccagcgcctggcgcagggcgagcatcaccggggcgaagctggcggccaggtcgtcgtggttgtacaccgggtactcctcgggacgccgctggctggcggtgaaggtgcagaactcgccggccagggccaccagttcgcggtacagctcctgcgggtgcagcgggcgcacgcgggacaggtgaccggtgagggcctcggcgcggttgaccagttgcagcagcaggaagtcggcgatttccgaggcgcccccggcgctggaggccaccacccgcccggcgagggcttcgccgcgctggtggagcaggcccagcagctccttggcgaaggacgccaggggcggcgcggcggcaatgtcgagtaccggcggcaggtagtcctcgtccaggctcagggcctggtccgcgcgcttctcgcggacccgcgcgacgcccaccgcggcgtattcgccgaggccgtcgcgctcggtcagcaggcggaacgcctggctgcccagggccactggcgcgcggctctcgaaggcggcattgtcgtcgcgcacttcctgcacctggctgacgtagcgggcgccgccgagggcctcgccctcctctaccgtgtcgcgggtgccgacccgcttcagcggcaggccgaggtagacgatgccatcacgcaggctttcctcgacattcagcggcgccggcgccggatcgtcggcggggatgttgaacggcgtaccatccggcagcacgccgcgggcgctgacgatggccagcttgccctgggtcagcagggcatcgtccagcttcagctcggaaaagccccagccgcccgccaggagcgagcggcagcggccatccaccagggtttccaggtagcggtcgtgctgctggaaatgctgtggccgcaggaacatgccttcggaccacaccacgcggttattccaggacatagggactccgaaggttcagggcgcgggacgcgcgacgatgccgatggcctgcgcgccgagcgtgatgtcgagatggctggtgcgttgccccggcacgtcgaggacctggcgccaggtggcgcggtcgaggtcgcggtaggcggcgacgaaaccgagctggcgggtctgctcgtcgagcgtgcgttcgatgcgccgttcctcgcccggacgcaggaggaactcgtcctgctccaccaggtcgccaccgagggtcgactgggcgttgtcggtgagggcgaagtagtcggcgcggccgaacgcggtgtctttcttcagctcgtacagccgcaggcgcagcggcgccgcctggccggcggcggacgggttgaggttcggtgcggcgtggagccagatcaccacccgggtcggcggggtttccggcgggctggacgaacaggcggcgagcagcagcccgaacagcgcgacgatcagtttctgcatggtgtcgtcctcattgacgttgtttctcctggtgttcgttggcgtcaggaacgccgtagtcgagcgctgtgttcctcgtaggcgcggctgaattcgcggccgaaaagctcctggaagtcgtcctccgcctcgcgcaggatcttcgcgtacagctcggtgaaactgtcccagttctgtgcctggcgggcccccggcagcaggccggaaagcccggccggcttgccgaagcgggcttccagcgcggccggttcgaagcgcgccagcaggtggcggatggcggcctgcacgccggccatcaccgccagctggtgcgccttgaggtcttcgaagctgtcggccaccgcgcgatccggcgccatgaacgcctggttgtcgcggcgcagcaggagcagcatggcctcgtcgacgttcggcgcgaacttcagcgggttgttctgcaccggctggatcatggtctgcgccatgcggaactcgcccttcaggctggcccgcgcgcgcagcacgtccaccagtccttccaccaggccgcgatagctgcggccgatggcttccatctgcgcttcggcgccggccgggtcgaccttcaactgggtcatgccggcgccgcgcaggaacgcttgcagcaggtcgccgccggccgacgcggcggcgcttgccggcggcgtcggcgccgccacgctcgctggctgtggctgtggctgtggctgtggctgtggctgtggctgtggctgtggctgtggctgtggctgtggctgtggctgtggctgtggctgtggctgttgggtgatccctgggtcggcgaagggcatcgccagcggcgtcggttcggccgtcggccgcggctgggcgacgggcgtggcgcttggcgcgggcgtgttgccgagcagttcggcgaacgggtcccagtcggccggaatcagcggtgcgccgccagcgggcggtggcgccggggtggtcgcggggggcggcgggatcaccggttccggcgggcggaagtcgtgctgttcggccggtacatggtccggacgcggcgccgcgccgggcggcggcggggtgaggaagtcgaacaggtcgggcttggtgtccagcggcgagccgccctggaaatgcgccgtcaccgcggggtgcggggtgggcgccggttcggcgaaggcaggcgccgatccggcggcctgccggctcatcagggcgtcgaagctggtgaacggatcggtctgcggattgccgctgccgggcagggcgatgtcatggccgagctggacgaggatgtcgtattcgccgaggcggacggtctcgccgtcctgcagcggctcgctgttgccgcggcgcaggcggtgcccggcattgaccagcagcacgccgttggtgctggtgtcggtgaggtagtacaccccgtcgcggttgaggatggtgcagtggcggctggagaccaggcgctccgggtccggcaggacccagtcgttgtccgggccccgaccgatggtcagctgtccctggtccagtaccttttccgaacactgaccgggggtcagcttgtggtagctggtgatggtcaatcgcagcggcattgctactccttgcattgccagcgcccggctcttccaggcgctcacccccgtgcccgagggatttcggttcgcatccaggctggcccgacggctttccggcgtttcgtcgcctcgggaagacacatcgggtgataccggattataaaagactaatcctacgtcttttaaagatttgtccgatctgcggtgtcatgcaactagtggcgttgtgccttccttgacaagccttgcggcatgccacaagaattttgccaacctttcgagtcatccgatattcatcaatggctcctacaagatccgacggagtggatcttacaagcgaaggtgagggccgcgcagcggcttcgatgatagggagatcgtcaccgtgctggatgtacccgttttgctggctgccgtatccccggactcgccctgtggcgacgatctggagtacgacgccgcgttcctcgaactcgaacgcatcgcccagggccaacccgagcgccagatgggcgatgccgtgctgcccgccgagccgccggagtggccgcgcgtacgcgcgctggccagcgaactgttcggccgtagcaaggacctgcgggtagccaacctgctgctgcagagcaacgtcgccctcgacggcctggacgggctcgccgacggcctgctgctggtccgcgagctgctcggccagtactgggacggcgtctatccgttgctcgacgccgatgacgacaacgaccccaccttccgtatcaacgccctcaccggcctggtcgccgaaccgctgctgcaactggtctgggcgatcccgctggtgcgctcgcgggcgttcggcccggtcaacctgcgcgccgcgctgaacgccgccgggctgcaacgcttcgccagcgagaccctgagtcccgagcagatcgccggcgccttcgccgatgccgacgccgatgcgctggccgccacccggcgcgccctggatggcgcccaggaacatgccctggccatcgagagcggcgtcgccgaacgggtcggctcggcccagggactcgacctcggtccccttcgtcaactgctgcgccaggccctccaggtgttcgacctgtacggcccgcagggcgccggcgagtccttggcgccgggtgccgaggcggtcgccgacgagcaggtgggtgccgcgcctgtcgcagccgtcgccgcgccggcaccgcgagccagcggcgagatcgccaaccgcgaagacgtcctgcgccagctcgatcgcctgctcgagtattacgttcgccacgagccgtcgagtccggtgccggtgctgctcaagcgcgccaagacactggtgacggccgacttcgccgaaatcgtgaggaatctcatccccgatgggatttcccagttcgaaaccctgcgaggcccggaaagcgagtaacgcctagcggccgtccgggccaacgctgcaagccgccggggcgattccgacggcgctaacaaccgccgtcgcgcgagggagaaacaagatgggaagcactaccagcagtcagaagttcatcgccaggaaccgggcgccacgcgtgcagatcgagtacgacgtggagctgtacggtgccgagaagaaggtccagctgcccttcgtcatgggcgtcatggccgacctcgccggcaagcccgccgaaccccaggcggcggtcgccgaccgcaagttcctggagatcgacgtggacaacttcgatgcccggctgaaggcgatgaagccgcgggtggccttcaacgtaccgaacgtgctgaccggcgaaggcaacctgagcctggacatcaccttcgagagcatggacgacttcagccccgccgcggtggcgcgcaaggtcgattcgctgaacaagctgctcgaggcgcgtacccagctggccaacctgctgacctacatggacggcaagaccggcgccgaggaaatgatcatgaaggcgatcaaggacccggccctgcttcaggccctggccagcgcgccgaagcccaaagacgacgagccgcaggcgtaagaggattccagcatggccgaattgagcaccgagaacctggcccagggccagaccaccaccgagcagaccagtgagttcgccagcctgctgctgcaggagttcaagcccaagaccgagcgcgcccgcgaagcggtggagaccgccgtgcggaccctcgccgagcatgccctggagcagaccagcctgatctccaacgacgcgatcaagtcgatcgagtcgatcatcgcggcgcttgacgccaagctcaccgcgcaggtcaacctgatcatgcaccacgccgacttccagcaactggaaagcgcctggcgcggcctgcactacctggtcaacaacaccgagaccgacgagcaactgaagatccgcgtgctgaacatctccaagccggagctgcacaagaccctgaagaaattcaagggcaccacctgggaccagagcccgatcttcaagaagctctacgaagaggaatacggccagttcggcggcgagccctatggctgcctggtcggcgactactacttcgaccagtcgccgccggacgtcgagctgctcggcgagatggcgaagatctccgccgccatgcacgcgccgttcatctccgccgcctcgccgacggtgatgggcatgggttcctggcaggaactgtccaacccgcgcgacctgaccaagatcttcaccaccccggaatacgccggctggcgttcgctgcgcgagtccgaggactcccgctacatcggcctgaccatgccgcgcttcctggcgcgcctgccctacggggcgaagaccgatccggtggaagagttcgccttcgaggaagaaaccgacggcgccgacagcagcaagtacgcctgggccaactcggcctacgcgatggcggtcaacatcaaccgctccttcaagctctacggctggtgctcgcggatccgcggcgtcgagtccggcggcgaggtgcagggcctgccggcgcacaccttccccaccgacgacggcggcgtggacatgaagtgcccgaccgagatcgccatttccgaccgccgcgaggcggagctggcgaagaacggcttcatgccgctgctgcacaagaagaacaccgacttcgccgccttcatcggcgcgcagtcgctgcagaaacccgccgagtacgacgatccggacgccaccgccaacgccaacctggcggcgcgcctgccctacctgttcgccacctgccgcttcgcccattacctgaagtgcatcgttcgcgacaagatcggttccttcaaggagaaggacgagatgcagcgctggctgcaggactggatcctcaactacgtcgacggcgacccggcccactccaccgagaccaccaaggcccagcacccgctggcggcggccgaagtggtggtggaggaagtcgaaggcaatccgggttactacaactcgaagttcttccttcgcccgcactaccagctcgagggactgacggtatcgctacgcctggtatccaagctgccttcggccaaagaggcctgaggcattcaacgacagcgcctgccatggtggcgggcgcttgcatagcgtagtggcgcgagccacacgggaggaaagatggctgttgatatgttcatcaagatcggcgacgtcaagggtgagtccaaggacaagactcacgccgaggaaatcgacgtgctggcatggagctggggcatgtcccagtccgggtcgatgcacatgggcggtggcggcggcgccggcaaggtcaacgtgcaggacctgtcgttcaccaagtacatcgacaagtccacgcccaacctgatgatggcctgctccagcggcaagcactatccgcaggcgaagctgaccatccgcaaggccggcggcgagaaccaggtcgagtacctgatcatcaccctgaaggaagtcctggtgtcctcggtgagcaccggcggcagcggtggcgaggatcgcctgaccgagaacgtgaccctgaacttcgcccaggtccaggtcgactaccagccgcagaaggcggatggcgcgaaggacggcggtccggtcaagtacggctggaacatccgccagaacgtgcaggcctgatgagccggctgccggtcatggcgtggccaggccatgccgtggccggtgcgagcgcccgccataccgggtgccgaaggcgcgcgcggcgcgccgcggacctcgtccgcccgacctcctgccggaggtactgaattccaccgggtcgtccgtcgcgtccgccgggcgccatggccgacccttcattcgcatccgggcgcctgggctcccggctacagggaagtatcgcgatgatcgccgaagaactgttgcgcgccgggcgcctggacgatgccttgaaagccttgcaggaacaggtgcgcagccagccgtcgaacgctaccctgcggatcttcctgttccagctgctggccgtgatgggccagtgggcgcgggcgcagaaccagctcaaggtggtcggcgaactggatgcctcggcgctgccgatggtacagacctactccaccgccatcgactgcgaggcgctgcgccgcgaggtgttcgccgggcgcctgacgccggtgatcctcggccagccggcggaatggatcgcgccgctgttgcaggccctgagcctggacgccgaaggccatggcgaggccgcccaggccctgcgcgagcaggccttcgacgccgcgccggcggtgcccggtcggatcggcgaagcgccgttcgcctggctggcggatgccgacacgcgcctcggcccggtgctcgaggtaatcgtcaacggtcgctatgcctggttgccgatgagcaacctgcgcagcctcaaggtcgaggcgccgagcgacctgcgcgacctggtctggctgccggccgaactgaccctggccaacggtggcgccaccgtcgcgctgctgccggcgcgctacgcggaaaccgtcgagcacggcgacgacgccgcgcgcctggggcgcaagaccgaatggctggacagcggcctgccggtcggccagcggctgttcgtcaccgatgccggcgagaccgcgctgttcgacctgcgtgaactggacttcgagccgacggacgcctgacatggccgaactgacccttcaggagcgcctgcagccgtcgctgctcgaccgcctcaccgacgacgagccgggcaacctcaaggaagccgcggagcgccgggtgctgaccctgaaccagctgaaggcctcggtgctgcgcgacctggcgtggctgttcaacaccacttcgctgttcgaccacggccccgccgcacggatgccggccggcaactcggtgctcaactacgggctgccggcgctggccgggcacaccgcgtcgagcgtcgacgtgcatgccatcgaggcgctgctcaccgagaccatcgctaccttcgagccgcgcatcatccgttcttcgttgcgggtgcgcgcgcaactgctgcccggcgagatggaccacaacgccctgagcttcgagatcgagggcgacctctgggccgaaccggcgccgctgcgcctgctgctgaccaccaacctggacctggagaccggccacgtgcgcgtcgcccagggcgagcggaggcgtacatgaacccgcgcctgctcgagtactacaaccaggaattgcaacacatccgcgaaagcgccgcggagttcgccgaggaattcccgaagatcgccgggcgcctgtcgctgtccggcttcgagtgcgccgacccctacgtcgagcgcctgctggaaggcttcgcctatctcaccgcgcgggtccagctgaagctcgacgcggagtacccgaccttcacccacaacctgttggaaatcgcctacccgcactacctggcgccgaccccgtcgatgaccgtggtgcagttgcgcccggaccccaacgaaggcgccctgagcagcggcttcagcgtcgagcgcggggcctccctgcgcggccagctcggccccgatgaccagaccgcctgcgaataccgcaccgcccacccggtgaccctgtggccgctggaagtggcccaggccgactacttcggcaatcccgccgcggtgctcggccgcctcgccgccagcgagccgcgggccaaggccggcctgcgcatccgcctgcgcagcggcgccggcatcccgttcgacagcctgtcgctggacgccctgccgctctacctgcacggcgccgacgaacaaccctaccgcctctacgaacaattgctcggcaacgcctgcgcggtgttcgtccgcgccccggacaatgcctgggtcgaacgcctgccgacgagcagcctgcgtgcgcgcggcttcgacgacgaggacgcgctgctgccggtggtgccgcgggcgttccagggctaccgcctgctgcaggaatacttcgccctgccggcgcgcttcctgttcgtcgagttctccggcctgaaccgcgccctgcgtcgatgccacggcgaggagctggaactggtcgtgctgttcggcaagcacgaccagcgcctggagggcacggtggacgcggagcaactggtgccgttctgcaccccggcgatcaacctgttcccgcgccgctgcgaccgcatccacctgtccgaccgggtcaacgagcatcacgtgatcgtcgaccgcacccgtccgctggatttcgaggtgcattcgctgcaacaggtgagcggccacggcagcggtccggagcaacccttccaaccgttctacgcggtgcgcgacccggcgcgctacggccgcgagcaggcctacttcagcgtgcgccgcgaaccgcgcgtgctgtccagcaagcagcggcgcaagggcccgcgctcgacctacgtcggcagcgagaccttcgtcgccctggtcgacgccaaccaggcgccctatcgccacgacctgcgccagctcggcatcgccgcgctgtgcaccaaccgcgacctgccgctgttcatgccgatcggcgcgcacaagagcgacttcaccctggaggacagcgcgccggtcatgcaggtgcgctgcctcgccggaccgagccggccgcgcgccagccgtgcccacgatgccagcgcctggcggctgatcagccagctgtcgctgaactacctgtcgctggccgagcgcggccagggcgccgccgccctgcgcgagctgctgcggctctacggcgacagcggcgatccggcgctgcaattgcagatcgagggcctgcgcgaggtcagcagcaagccttgcacgcggcgcctgccgatgcccgggccgatcgtcttcggccgtggcctggagatcaccctggacttcgacgagaacgcgttccgcggcaccggggtgttccttctcggcgctgtgttcgagcgcttcctggcacgctacgtgtcgatcaacagctttaccgagacggtgctgcgcaccggcgaacggggcgaggtgatgagatggcaggcgaagccgggcagccgtccgaacctctgaacctgctcgccgggatggcggcggcgccctgggactatgacttcttccaggcgctgcggcgcatcgagtgcgagtcgccgcaactgccgcgcctcggtcattcggtgcggctggcggacgacccgctgcgtctcgggcagaagcccgactgcaccttcgcgccctcgaccctggcctcggtgagccaggccggcaccgctgcggtgccgcgcctggaccagttcttcttcggcctcaccggccccaacgggccgctgccgctgcacctcaccgaatacgcccgggaacgccagcgcaacgtcaacgacgcgaccttcaagcgcttcatggacgtcttccaccaccgcctgctgaccctgttctaccgggcctgggcggaggcgcggccggagatcagccacgaccggatcgacgacgactactggtcggcgcgcctcgccgcgctctccgggcgcggcatgccgagcctgcgggggcgcgagccgctggcggataccgcacgctactactacaccggccacctcgccgcgcagacccgctacccggacggcctgcgggtgatcctcgcggagtatttcgaggtcccggtggcggtcgaggaatacgtcggccaatggctggagctgcccgagcgcagccgcctcggcgtcgactcgacgagcctgggcatggacgtctgcctgggcacccacgtctgggaccgccagcacaagttccgcctgcgcctggggccgctggacctcgatcaataccagcgcttcctgcccgacggcgaccacttcgtcgagctggccgcctgggtcgccgaatacctgggcgaggagctggactgggacgtcaacctggtcctgcaacgccacgaagtacccccgctgggcctgcagggcggcgggcggctcggtttcaacacctggctgggcgatcccggccaggacgccagggatctactgctggcccgccagtacgccactgcgcggccgcacgagcacaaggagaaggaacatgagtgagatcagtcgcgttgcgctgttcggcaagctgaacagcctggcctacaaggccatcgaggccgccacggtattctgcaagctgcgcggcaatccctatgtcgagctggtgcactggttccaccagatcctccagttgccggactcggacctgcaccagatcgtccgccagtccgggatcgacccggcgcgcctggccaaggacctgaccgaggccctcgaccgtctgccgcgcggctcgacctcgatcaccgacctgtcctcccatgtcgaggaagcggtggagcgcggctgggtctacggcagcctgatgttcggcgagagccaggtgcgcaccggctacctggtgatcggcatcctcaagacgccgagcttgcgccatgccctcaccgggctgtcggcggaattcgccaagctcaaggtcgaggcgctcaccgagcgcttcgacgagtacgtcggcgcctcgccggagaacggcctgtcggccagcgacggcttcaacgccggcgccgccccgggcgaggccagcggcgccctggcgccgagcgcgatgggcaagcaggaggcgctcaagcgctttaccgtggacctcaccgagcaggcccgtagcggcaagctcgaccccatcgtcgggcgtgacgaggagatccgccagttggtggacatcctcatgcgccgccggcagaacaacccgatcctcaccggcgaggccggcgtcggcaagaccgcggtggtggaaggcttcgccctgcgcatcgtcgccggcgacgtcccgccggcgctgaaggacgtcgaactgcgcgccctcgacgtcggcctgctgcaggccggggcgagcatgaagggcgagttcgagcagcgcctgcgccaggtgatcgaagacgtgcagagttccgagaagccgatcatcctgttcatcgacgaagcccacaccctggtcggcgccggtggcgcggccggaaccggcgacgccgccaacctgctcaagccggccctggcgcgcggcaccctgcgcaccgtggcggcgaccacctgggccgagtacaagaagcacatcgagaaggacccggcgctgacccggcgtttccaggtggtgcaggtggacgagccgtccgagcacaaggccatcctgatgatgcgcggtgtcgcgtcgaccatggagaagcaccacaaggtgcagatcctcgacgaggcgctggaggcggcggtccggctgtcgcaccgctacatcccggcgcgccagctgccggacaagtcggtgagcctgctggataccgcctgcgcgcgcaccgccatcagcctgcacgcggtgccggccgaggtcgacgatagccgccggcgcatcgaggcgctggaaaccgagctggcgatcatccgccgcgagagcgccatcggcgtcgccaccgccgaacgccagcgcaacgccgagaccctgctggccgaggagcgcgagcgcctggccgccctggagcagcgctgggccgaggaaaaacgcctggtcgacgaactgctggagacccgcgcccgtctgcgtgccgccgccgaagcggtggacgccggcggcgtgccgctgggcgaagacgaggcgcgtctcgacgaggaacagcgccaggcgctgcatgcgcggctggcggagctgcaggcgcaactgagcgcgttgcagggcgaagagccgctgatcctgccgaccgtggactaccaggcggtggcctcggtggtcgccgactggaccggcatcccggtcggccgcatggcgcgcaacgagatcgagaccgtgctcaacctcgaccggcacctgaagaagcgcatcatcggccaggaccacgcgctggagatgatcgccaagcgcatccagacttcccgcgccggcctcgacaacccgagcaagccgatcggcgtgttcatgctcgccggcacctccggggtgggcaagaccgagaccgcgctggccttggccgaggccatgtacggcggcgagcagaatgtcatcaccatcaacatgagcgagttccaggaagcccacaccgtctccaccctcaagggcgccccgcccggctacatcggctacggcgagggtggcgtgctgaccgaggcggtgcgtcgcaagccctacagcgtggtgctgctggatgaagtggagaaggcccacccggatgtccacgagatcttcttccaggtcttcgacaagggcttgatggaggacggcgaaggccgggtgatcgacttcaagaacaccctgatcctgctcaccaccaacgccggcaccgagatgatcgccagcctctgcgccgatccggaactgatgcccgagccggaagccatcgccaagtcgctgcgcgaaccgctgctgaagatcttcccgccggcgctgctcggccgcctggtgaccatcccctactacccgctcagcgacgacatgctcaaggccatttcgcgcctgcaactggggcggatcaagaagcgcgtggaggcgacccacaaggtgccgttcgagttcgacgagggcgtcgtcgagctgatcgtctcgcgctgcaccgagaccgagagcggcggccggatgatcgacgcgatcctcaccaacacgctgttgccggacatgagccgcgagttcctcacccgcatgctcgaaggcaagccgttggccggggtacgtatcagtagccgcgacaaccagttccactacgacttcgccgaggccgagtgacaaccggcgacacgcagagcagtagaaggaaccgtcgatgggattgatgcaactgacccgcctggtccaggtggattgcccgctggggccggacgtgctgctgttgcagcgcatggagggacgcgaggaactgggacggctgttcgcctacgagctgcacctggtatcggaaaatcccaacctgccgctggagcagttgctcggcaagccgatgagcctgtcgctggagctgcccggcggcagccggcgcttctttcacggcatcgtcgcgcgctgtagccaggtggccgggcacggccagttcgccggctaccaggccaccctgcggccctggccgtggctgctgacgcgcacctcggactgccgcatcttccagaaccagagcgtgccggagatcatcaagcaggtgttccgcgacctcggcttttccgatttcgaggatgccctcacgcgcccctaccgcgagtgggaatactgcgtgcagtaccgcgagaccagcttcgacttcatcagccggctgatggaacaggagggcatctactactggttccgccatgagcagaagcgccatatcctggtgctctccgacgcctacggcgcgcatcgcagcccgggtggctacgccagcgtgccgtactacccgccgaccctcggccatcgcgagcgcgaccacttcttcgactggcagatggcacgcgaggtccagcccggttcgctgaccctcaacgactacgacttccagcgccccggcgcgcgcctggaggtgcgttcgaacatcgcccggccgcacgcggcggccgactacccgctgtacgactatcccggcgaatacgtgcagagccaggacggcgagcagtacgcgcgcaaccgcatcgaggcgatccaggcgcagcacgagcgcgtgcgcctgcgcggcgtggtgcgcgggatcggcgccgggcacctgttccgcctgagcggctatccgcgcgatgaccagaaccgcgagtacctggtggtcggcgccgaataccgggtggtccaggaactctacgaaaccggcagcggcggtgccggctcgcagttcgagagcgagctggactgcatcgacgccagccagtcgttccgtctcctgccgcagactccggtaccggtggtgcggggtccgcagaccgcggtggtggtcggacccaagggcgaggagatctggaccgaccagtacggccgggtcaaggtgcacttccactgggatcgccacgaccagtcgaacgagaacagctcctgctggattcgcgtgtcccaggcctgggccgggaagaactggggttcgatgcagatcccgcggatcggccaggaagtgatcgtcagcttcctcgaaggcgacccggaccggccgatcatcaccgggcgggtctacaacgccgagcagacggtgccctacgagctgccggcgaacgccacccagagcgggatgaagagccgttcgagcaagggcggcacgccggccaacttcaacgagatccgcatggaggacaagaagggcgccgagcagttatacatccacgccgagcgcaaccaggacaacctggtcgagaacgatgcctcgctgtcggtcggccacgaccgcaacaagagcatcggccacgacgagctggcgcgcatcggcaacaaccgcacccgcgcggtgaagctcaacgacaccctgttggtgggcggggcgaagagcgacagcgtcaccggcacctacctgatcgaggccggcgcgcagatccgcctggtctgcggcaagagcgtggtggagttcaacgccgacggcaccatcaatatctccggcagcgccttcaacctctacgccagcggcaacggcaacatcgacaccggcggccgcctcgacctcaattccggcggcgccagcgaggtcgacgccaagggcaagggcgtgcagggcaccatcgacggccaggtacaggcgatgtttccgccgccggcgaagggctgaggcggcggcatcctggccgcccgccctcgggcaggacgccgcgggagccttgacgattcgcgcatgtcctcgccaggcagaagcggcggtcgctcaagaccgatggtgttgcgctcagggcagatcgactttcaggccgcggccagtgcgtataccgacgtagtaggcgtccttgagggccctggagagttccgggtcggtttcgtcgaattccttcacggcgatgctgccgagggtcaaccggtgcagtgcggaacgatccaggctgcggtcgagcaggacggacctgatgtactgcaattgcttttccgcggacagcaggacctcgtatcccggatagcgggccagccggtcgacgaccagcgccagagcgcggtcgatgtattcgatgggtgtcatgatccctcccggggaagcagaccgaaggagcctttctcgttggagaacagttgttgcgcgccgcctttggcgggatatgactgtccctttaccgaccagaagtcatcggtcggcgcagcggtgctgcgcaggacctcgaccttctgggtcgtcctgtaggagttgaggaccttgggttcgatggtgttcgccgcccggttggtgcccatggggttgattcccagctccgtgggctgcacgcgcgggctgagtgtataccagttgccctgcggcgctccgggggactggtactgccacaggttcttgccgggcgcgagggtttccacacggaccggatggttgaagtccaggccgttcatgtacgactcggcatcggcaggatcgatgtccttcgacttgaagaacttggcggcggtttcacgattcccgcggtagttgatgtcgtggtcgaggttgccggaacgaccgaacttgttgttcaggtaggcgcgtcgttgcgcggtttcggaggtcaccgctgccggacgacgaccggcgagtttcggcccgaagcccagcaatgccatccccgccacgccctggaacaggtcgcggtagccgggaccgaggcggtcgccgaggtcgccgagcagggccatgccgcccatcatcagcccgccgatggcgacgaagccggccagcgccgcgaccccggccatcgccgccagcagcaggccgccggcaagggccgccaggcccagcgcctcgaggccggtgtgcagccattcctccaggtcgaggacgaaggccacccgctcggtggggccgccgatgaaggtgtcctggctgccggtcttgatgtgcgcgccgcagaccatcttgctctgcaggcgcgccgccggcttgccgttgatgtacacggtggcgctgccttcggcgatcagcaccgggaacggccacagcggatggttcagcggcaggccgctgcaggtggcggagacgtcgtcgccggcgcgcatcgcgttgcgactgttcacgtagacgttgaagctgccgcgtatgagcaccccggtggtcggctcgggtagctcgaagatggtggtcaggcccttgacgatctggaacatcgacagcccgccggcggcgatcgagccggccaggatcaccgcggccaggccgccggtggcggcggtggcggcgaccacggcggcgccgatcagggctccggccacggctccggcgaccatcgcggcgacaccgaaaccgtgggctatctcatcgcccagtcgggcggcggcttgcgcatccatgcgtcggtactcggatcagctaggggtcgggcgcgggaccagggtctgcatcgcctgcttccaggccggctcgtggtgcggcaggtcagccggggtggtggtcagggtggtgatcagcaccgccgggcggcgctcgatgaacacctggcgcagcatcaggtcgcggccctcgcgctgccactggtagtcgaggagcacggcggcgtggccgtgaatgttgatgtcccagcgcttgtgcagcttgaagccgggcaattgcttctcggcattctccagttggcgggcgacatagtcggcgaacggcgcgtcgccctggctggcgtcgcggctgatgacgaaactggcttcgcgggcggggccgctggcggggagcttgaagatgttgatgctctggtcctgccaggcatcgggaatctcgagatcggcttcgtggaggcgatagagcgtcactgtgttaaccccttccctaggattctgagtgagtcattgctggacaaaagctttacggaatgttgctcgcgaatcaaggctttcctggcccgaagcggcctttcgtgatggccttctgcctgttcgccgtcggtcggggcgctcgtcggaatctgtgtcacgcatctcccctttccaccgcatccgcgcctatgctgcttgggtggcgccgctccaacggcgccagtgatggacgtggatcaaggatgatttcatggcacttgcgcaacagacccgcctggtccgggtcgacagtccgctcggcgcggaggtcctgcaattgcagcgaatggagggtcgcgaagagctcggccggccgttcgcctacgagctggaactgatctcggaaaaccccgacctgccactcgacgggctgctgggcaagccggccagcctggcgctggaactgcacgacggcagccggcggcatttccacggcatcgtcgccgcttgcagccagggatccggcaacggccagttcgccagctaccaggtcaccctgcgcccctggctgtggctgctgacgcgcacctccgactgccgcatcttccagaaccagaaggtcccggacatcatcaagcaggtgttccgcgacctcggcttctccgacttcgaggacgccctgagccgctcctaccgcgagtgggaatactgcgtgcagtaccgcgagaccagtttcgacttcgtcagccggctgatggagcaggaaggcatctactactggttccgccacgagcagagccgccacatcctggtgctctccgacgcctacggcgcgcaccagagcccgccgaactacgccagcgtgccctactacccgccgaccctggaacagcgcgagcgcgaccatttctacgactggcacatggcgcgcgaggtgcagtccggctcactgagcctcaacgactacgacttccagcgtcccggcgcgcgcctggaggtgcgttcgaacatcgcccgctcgcacgcggcggccgactacccgctgtacgactaccccggcgaatacgtgcagagccaggacggcgagcagtacgcgcggacccgtatcgaagccttgcaggcgcgctacgaacgggtgcgcctgcgcggccgcgcccgcggcctgggttcgggccacctgttcaagctcagcggctacccgcgcgaggaccagaaccgcgagtacctggtggtcggcgccgagtaccgggtggtccaggaactctacgagaccggcggcggcggggtcggcgcgcagttcgagagcgagctggactgcatcgatgccggccaggcctaccgccccttgccgaccactccgctgccgatcgtccgtggcccgcagactgcggtggtggtcgggcccaagggcgaggagatctggaccgaccagtacggccgggtcaaggtgcatttccactgggaccgccacgaccagtccaacgagaacagctcctgctggatgcgcgtctcccaggcctgggcggggaagaactggggctcgatccagatcccgcggatcggccaggaagtgatcgtcagcttcctcgaaggagacccggaccggccgatcatcaccgggcgggtctacaacgccgagcagacggtgccctacgagctgccggcgaacgctacccagagcggcaccaagagccgttcgagcaagggcggcacgccggccaacttcaacgagatccgcatggaggacaagaagggcgccgagcagttgttcatccatgccgagaggaaccaggacatcgaggtcgagaacgacgagacccactgggtcggccacgaccggaccaagaccatcgaccacgacgagaccgtgcacgtgaagcacgatcgcaccgagaccgtggacaacaacgagaccataaccatcggcgtcgaccgcaccgagaaggtcggcaacaacgagaagatcagtatcggcgcgaaccgcaccgaggacgtcggcagcaacgagaccatcagcatcggcgtcgaccgcaccgagaaggtcggcagcaacgagaagatcagcatcggtgccaatcgcaccgaggacgtcggcaacgacgagaccatcagcatcggcgcgaaccgtagcgagtcggtgggcaacaacgagacgatcagcatcggcgccgaccgcagcgagtcggtgggcgccaacgagaccatcgacataggcggcaaccagagcaccagcatcggcaagaacgagtcgcgcagcgtcggccagggccgcgatacctcggtgggcaaggacgatagcctggacgtgggcaagagcttcacgctcaacgccggcgactcgatcaccctggtcaccggtgccgccagcatccgcatgaagaaggacggcagcatcgtcatcagcggcaagaacatcaccatcgacggatccggggcgatcaacgtcaaggccgacaagaacgtggtggtgaagggacgcaagatcctccagaactgaagcggcgcagagccagggagtcagcgcatgagtgtcgagatccatctacccggggccacgacggcccttcccgcgcgcctggacggtgtggtcatcggcgtcctcctcgacgtgccggacgccgccgctccggtggtcgcctatcccggttgcccgagcgagcacggcctggcggcggccaccaccacccagctcagtcgcgccgacatcggcgcccaggtagcgctgatgttcgtcgccggcgatccgcgccagccgctgctgatcggccgcatccagcgcctgccgcaggaagcgctggcgcaactggacggcgagcgcctggagttcagtgccgaacgcgagatcgtcctgcgttgtggcaaggccagcatcaccctgacccgcgccggcaaggtgatcatccgtggcgcctatctttccagccgctccaccggggtcaaccggatcaagggcggttcggtgcagatcaactgagcgcggcgggcccgacatggaactgttgaacgccaccccgctggccgccgcctacaaccaggggctcgacgccgaaggccgggagtcgctggtggtgatcgccaagggcagtttcgacctgccgctggacggtcgcgaggcgcgcctgctggacgagcagcagacgctgctgatggtcgatgaattctatggcgagccggggttttccgcgccgcgccgggagtgcgagttcgttcccttcaagccgttctgcgatgtgctggtgctgggcagcgcccaggcgcccggcgggcggccggtacagcagttgaccgcgggcatccgcgtcggccgggtgagcaaggcgctgacggtgcatgggccgcgccagtgggaaccgggattgctcggtgccggcgcgggcgtcgcgcagccgttccagagccaggacatttcctacgccagtgccttcggcggcagccatgcctcgccggacaaccccggtttcatggattgctacatggccaatccggccggatgtggctggtttccgcgcagcgccgacaccgccgagatcgtcggcacgccgatgccggccacggaaaagctcggcgagccggtggacagcccccacggccgcttcacgccgatggcgctcggcccgctcggtcgccactggcaggcccgggtcggctttgccggccgctacgacgacgcctggctggccgagcgcttcccgttcctgcccgccgacttcgacgagcgctacttccagtccgcgccggccgaccagtggaccgaccatctgcgcggcggcgaggaggtcctgctgctcaacctcaccggcgaggagcgcgcggccttccgcgtgccgcgcagggaggtcccggtgaccttcttcctgaaaaagggtggccacgaaaccgcgcaagcacggatcgataccctgctggtggactgcgacgcccgtcgcgtggaagtcacctggcgcattcgccggccgttgaagcgcaacctgttcgagatcgcccaggtgctggtcggcagcaagtccgccgcctggtggcgcgcccgcgagctgggcaaggactactacccctcgcttgccgcgttggcacgcagccgccaggccgaggaggacgaggcatgagccaggccctgagcatcgtcgcctccggcatggtcagcgcggtcggtctcagcgcgccggccagctgcgcggcgatccgctgcgccctggacaacttccaggaaacccgtttcatcgaccagggcggcgaatggttgcttgccgccagcgtgccgctggagcagccctggcgcggccgcgccaagctgctgaagatggctgcgcgagccatcgacgaggccttgcgcggccagcccgatctcgattgcgcggagctgccgctgctgctctgcgtcgccgagggcgaccgtcccggacgctgcgcggggctcgacgagtctttcctgcgtgacctggaaggcgagctgggacgacgcttccatccctcctcggcactcatcgcccgtggccgggtcggtggcgcggtggccctgctcaacgcgcgcaagctgatccagggcggctgccggcaggtcctggtggccggcgtcgactccttcgtcagcggcccgaccctggccgcctacgaggcccgcgagcggctgctgaccagccagaactccaacggcttcattcccggcgagggcgccgccgccgtgctggtcgccgcgccgctccacgaggaggcgccgcagctgctctgcatcggcctcggcttcggcatcgagaaggccacggtggagagcgaggacctgccgttgcgcgccgacggcctgacccaggccgtgcgcgccgccctcgccgaggctggctgcggcctggagcagatggactaccggctcaccgacatttccggcgagcagtactacttcaaggaggcctcgctgaccctgagtcgcaacctgcgcgtggtcaagccgaagttcgacctctggcaccccgccgactgcatcggcgaatgcggcgccgccatcggtccggcgttgctcgccgtggccctggccgcttcgcgcaagggctacggcgacgggccgaacgtgttctgccacctgggcaacgatgccggcgaacgcgccgccgcgctgctcagctatcgacgggtgagggctgcctgatggccaacgaggtgtacgccaacaacatggagatctcctgcaaggcggcgagcggcaagtccatcgcggccttcccggatgtctgcttcaccccgccgcaggcgccgccgacgccgttgggggtaccgatcccctaccccaataccggcctgtccaaggacaccaccaaaggcacccggaccattcgcatcacccgcaaggaggtgatgctgaagaacaagagctactacaagaccagctacggcgacgagccggggcgggcgccgaagaagggcatcgtcaccagcaagatcaagggcaaggtgtacttcacctcctggtcgatgaacgtcaagttcgaaagcaagaacgtggttcgccacctcgacctgaccacccacaaccacgcgtcctttcctggcaatacgccggtctggccctacctcgaccaggccaccgtcgatgctggtggtggaccgtgcagcaatgaagtgaagaaggagaagaaggattgcgctgacttcaagccgcatggcagcaaggatgcctgcgctggccttggcgcgggcaagccttccggcaagaagaccagcaacgaagctgaccgactggcagacaaggtcgctgcccgaaaatgcctgaccgcgcgccggtgtgccctgcaaccgtacaagccgaacagttgctgcccgcagcagaccgctcaccacctgatcgaggccagcgccttgcacgacaagggacgtggtggaaaaggctcggtacccctcaaggggatatccaactattcggagaacaaggctccttgcgtctgcgcggagggcgtcaatcagaacgtgggtacccacggcctcatgcacacgttccagagcgccgctgccgcgaagtcgcgcagtggaaccctgcaattgtccaatggcagctccatctccgcgaagaagaccacctacggaacggcgaaacgtcaatccatggctgccatgggcaaggtctttccgcagtcgaaatgctcgaaggaatgtctgtccgctcagctcgacaactatcacaagcagtgcggaatcaacgccagaacacccatcaaggccgttgaaaccggccagaccgacgtcacggctgcgacgcaggcgataaagacccgcaatgcgcgtcttggcgccacgaggagtcgagtccgctagtgaccgttacaggagattgaaatgttgaagaaactctcgccgattttctcgaacatcaccggcgtcgtccgctatcaggacctggcgtacgtggcctcggtatccgacgagatccaggagcagaacatagcgcacagctatgtcacggagtgggactgcggaacctggtgtgttgctggcgaggatgacgacatgctgccctgggagatcgtgtcggccacggtagtgcacgagccagtggaacaagcattgtttctgggcgctcggggccaggtattctgcatgggctccggcgacatccatgaagagcagttgcccgacggcgacgatgccatcggtggccggggcaatatgcgcggcgttgcctgtatcgacggggtggcctatgcctgcgggatggatcgacaggtctaccggcgcttcgacgagaacgactggcgtgccatcgacaccggcgctcggcctccggcaggcagcgaagcggtggtcggattcgaggccatcggcggcttcggtgccagggaaatctatgccgtcggctgggacggggagatctggcagtacgacggcaagcgctggcagccccgggagagcccgacgaacttgatcctgacggcgatctgctgcgcggaagatggctcggtttacgcctgtggacaggcgggaacgctgctgcgtggacgcaacgaccactgggagatcatcgcccaggacgatgtcgatgaagacttgtggagcctcgcgtggttcgacggcgcactctacgtgtcgagcgcaacggcggtctatacgctggtcggtggccatctcaaagaggtggacttcggtgatgagcaaccccaacgctgcttccaccttagcgctgccgacggcgtgttgtggagcatcgccgcgaaagacatcttcagcttcgacggccagcaatggacgcgcatagattgagcatcgcagcgatcgtcgaccagcacgccgaggaagccgccttccttgccctgctccgcgactacgccgtgcgtgcgccccattacgacctggaggagctcgccgagctcgatcagcgcatcgaggcgcacctggacggcttggcgatcgccggccaggccggccatgacgccctgctcgagcaactcgacgcgcacgcccagggcgaggcgttcgccctcgcggtactggccatgcaggcaggagacgatgcgttgatcggacggatgcgcgcctgtcttgcggcgtctccggaagcccggcgcggtttcgccgcagccctcggctggctcgactgggaccaggcgcggccctgggtggagcgcctgctggcctcgcccgagccgctgttccgcgccattggcctggccgcctgcggcatgcaccggcatgacccggggccggcgctgctgtccgcccttggccacgccgacccggcggtgctggcgcgcgccgcgcgcaccgccggcgagctgcgtcggcgcgacctgatggcgaatatccgcgcctaccgcgcccacgacgacccgagcctgcgcttctgggccaactgggccaccgcgcagatgggcgacgaggaggcgttggggccattgcgtgcgttcgccgggcagcccggcccgttccagctgccggcgaccatggtgctgctcgcctggcagccgcgcgacaccagcatggcctggattcgccaactgatgcaggcggcggacacgcggcggatcggcatccaggccaccggcctgttcggcgatccggtggcggtgccctggctgatccagcagatgcgcgacgagagtctggcgcgggtcgccggcgaggccttcagcctgatcaccggcgccgacctggcgttgctcgacctggagctggaggtcttgcccgactacgaccctggccccaacgacgatcccgacgacgacaacgtcgccctcgacgacgacgagaaccttagctggccggaggcggagcgagtctccgcctggtggcgtgacaacggcgcgcgcttcgtcgccgggcgcgcctacctgctcggcgaacctctgggcgaggcgcactgccgccaggtcctgcgcgacggccagcaacgccagcggatggctgcggcgtgcctgctggcgcgcttcgtgccgaacctgccgctgttccccaccggtgcgccggtgcgccgccaactggacctgttctggtagctggctggcaccgggcggccaggtcatggccgctggcgcggtgcgccgggttttcccattcgacgaatttccctgcacgtagccaaccggttgactgaaacctttcaccacttatgcggggcgaatggaaatgccactcgtttgccatgatagcctgtcgacatcctctggaaatatcgtgaaaaaagctgacaacgtgcgagatagagggattttttaatttatggttaagcttcgggcattagcgttgagcaccagaagtgaccgatcggtcacgtaggtcgctctgcgtttgttgtgcctttttcctatggggaaagcgtcggcagacgtgggaaaattcaatcgatccactcatcgaggttccgaaccatgccagaccgtatgcggggcgttaagtccgattctccagagcaggaaagcgctgacgatgcattgaaaaggattgtcgatggattccagcatttccgccgggaggtctttcccgagcagcaggcgctgttcaagaagctcgccaatagccagcggccgcgggcgatgttcatcacctgcgcggattcgcgcatcgttcccgagctgatcacccagagttcccccggcgacctgttcgtcacccgcaacgtcggcaacgtggtgccgccctacgggcagatgaacggtggcgtctccaccgccatcgaatacgctgtgctggcgctgggcgtgcaccacatcatcgtctgcggccactccgactgcggggcgatgcgcgccgtgctcgacccgcagaccctggaacgcatgccgacggtcaaggcctggctgcggcacgccgaggtggcacgcacggtggtggcggacaactgcgactgcggcgccagccacgacaccctcggggtgctcaccgaagagaacgtggtggcccagctcgatcacctgcgcacccacccctcggtggcctcgcgcctggccagcgggcaactgttcatccacggctgggtgtacgacatcgagagtgcgcagatccgcgcctacgacgccaagcagggtcgcttcctgcccctcgacggcgagcatccggtgccgatggccacgcccgcgccgcgctacctgaactcgtgatagcggcggccgtgcgggccgccggataacaacagcgttttcgcgtcacctttcgccgttcctgccatggacgacctctgggaagccccgttccggggctgaacgggtcgctattacaagaaaaaacacactgcgcacacacaaccggcgccgggcctggtcctggcgtcgctccctcgtcgtggaaaaaattcgcaggagaactgtgccatgcatgtttcaaaggtgtttccgtccctccgggacacgttgccgcgggacctgatggcctccgtggtggtgttcctcgtcgccctgccgctgtgcatgggcatcgccatcgcctccgggatgccgccggccaagggcctgctcaccggcatcgtcggtggcctggtggtcggcttcctggccggctcgccgctacaggtcagcggcccggcggccggcctcgcggtgctggtcttcgaactggtgcgtacctacggggtggccatgctcgggccgatcctgctgctcgccggcgccatccagctgctcgccgggcggctgcgcctgggctgctggttccgggtcacctcgccggcggtggtatacgggatgctcgccggcatcggcatcctcatcgtcctttcgcaattgcacgtgatgctcgacctggcgcccaaggcgtccggcctcgacaacctgctggcattcccccaggcggcgttcgccgcgctcggttcgctgggcatggacagcggcctcgacgcggcgctgctcgggctgggcaccatcgcggtgatgtggggctgggacaagctgcgtccgcaacgcctgcgcttcctacccggcgcgctgctcggcgtgagcctggcgaccctggccagcctctggctggcgctggacgtgcggcgggtcgaggtaccggccaacctcggcgaggccatcgactggctacgcccggccgacctgctggccctggccgatccctccctgctgctggcggcggtggtggtggccttcatcgccagtgcggagaccctgctctcggcggcggcggtggatcgcctgcacgacggcccgcgctcggacatggatcgcgagttgtccgcccagggtgtcggcaacatgctctgtggcctgctcggcgcgctgccgatgaccggggtgatcgtgcgcagctcggccaacgtcaacgccggtgcgcgaacccgcgcctcggcgatcttccacggcctctggttgctcgccttcgtcctcctgctcggcagcctgctgcggcagattccggtggcgagcctggccggggtgctggtctataccggggtcaagctggtcgatttcaaggccctcggcaacctctctcgctacggccggatgccgatgctggtgtacgcggccaccgccctggccatcgtcttcaccgacctgctgaccggcgtgctggtgggcttcgccctgaccctgctgaagctggtgctgaaggcggcgcggctgaagatcgccctgcgctacaccggcgagcatgaagccgagctgcgcctgagcggcgccgcgactttcctcaaggtgccggctctgtcgcgggtgctcgacgaggtcaagccggggaccaccctgcacgtaccgatggataacctcagctatgtcgaccatgcctgcatggagctgctcgaggattgggggcggatggcaccggtgcagggctcgcgcctggtgatcgaaccgcgcgccttgaagcgtcgcctggaagggcgcctgcgcggcagcgtcgggttgggcggcgcgcgcaatggcggggcggtcagcccaggctgagttccaccccgagctgcttcgacaggcacggccactgctgccaggcggcgaccacccgcgggttcttcaggttctcgcggtaggcgcgggccgagtcggcgtcgaaggtggtggcgtcgagcatgttctccactgcatggtggacggcttcgtccagccggttggcgaagggctcgccgatcaactggtgggccaccaggttggctacggtggtgtccagtgggatcagtgcctggccgaagtgggcgatgtagcggtcgttcacttcttccaccaggcggtgcgccaggtaggcttcgtcgagcagggcgtcgaggccgtcgtggccggcgagcaacgccggcggggtgaggaagaactgctcggcgaccttcagcaccggcttgatccgttcctcgatgccggcttcgcgggccacgctgttggcggcgtcgagcaggtccggtacctgttcgacgtaggcgtggacgaagcgggtgagtatgtcttccgtgttctcgccttgcggctggatggtgcgatgcaggcggggcaggcggctggctatcagatcagccaggtaaccgtggcgggcttcgctgaggtgcgcctgctggatgagttcacggagggcagcggtgttcatggggtctcccatacaacggggatggtgaagaagaggagaaacatagccggcggcgcgcgccggctaagacgcgattgtcataatcgcttcgtggttatgcgaggatgatatatcaggcggccaccattcgcctgcaaagccacgccgctcgcggcttttagagaagaatcggcactttccagcgacgtttttacgctgcgttgttatgtcgcagccgctgtctatactcccactcgaatgctgaacctgatgaacccggcctgccttgctgtgtgccgaggtgcgacggtcaaagttcgttgtcttggcggtccaccccttggccgttggcgtctgccggcgggataaaaacaacgataaggggaacccgaatgctgcgacatccacgagtctggatgggcttccttttgctctcggcgatcagccaggcgaatgccgcctggacggtcaacatggccccgggcgctaccgaggtgagccggtccgtcttcgacctgcacatgaccatcttctggatctgcgtggtgatcggcgtgctggtcttcggcgcgatgttctggtcgatgatcgtccaccgccgctccaccggccagcagccggcgcacttccacgagagcaccacggtggaaatcctctggacggtggtgccgttcgtgatcctggtggtgatggcggtgcccgccacccgcaccctgatccacatctacgacacttccgagccggagctggacgtgcaggtcaccggctaccagtggaagtggcagtacaagtacctgggccaggacgtcgagtacttcagcaacctggccaccccgcaggaccagatccacaaccggcaggcgaaggacgagcattacctgctggaggtggacgagccgctggtgctgccggtgggcaccaaggtgcgcttcctgatcacctccagcgacgtgatccattcctggtgggtgccggccttcgcggtcaagcgcgacgccatccccggcttcgtcaacgaggcctggaccaaggtcgacgagcccggcatctatcgtggccagtgcgccgagctgtgcggcaaggaccacggcttcatgccgatcgtggtcgacgtcaagcccaaggccgagttcgaccagtggctggccaagcgcaaggaagaggcggcgaaggtcaaggaactgaccagcaaggagtggaccaaggaagagttggtcgcgcgcggcgacaaggtctaccacaccatctgcgccgcctgccaccaggccgaaggccagggcatgccgccgatgttcccggcgctgaagggttcgaagatcgtcaccgggcccaaggagcaccacctggaagtggtcttcaacggcgtgcccggcaccgccatggcggccttcggcaagcagctcaacgaggtcgacctggccgcggtgatcacctacgagcgcaacgcctggggcaacgacgatggcgacatggtcaccccgaaagacgtcgtcgcctacaagcagaaacaacaataggagaccgccatgagtgctgtgatcgatacgcccgaccaccatgccggcgaccaccaccacggaccggccaagggcctgatgcgctgggtgctgacgaccaaccacaaggacatcggcaccctctacctgtggttcagcttcatgatgttcctgctcggcggctcgatggccatggtgatccgcgccgagctgttccagcccggcctgcagatcgtcgagccggcgttcttcaaccagatgaccaccatgcacggcctgatcatggtcttcggcgcggtgatgccggccttcgtcggcctggccaactggatgatcccgctgatgatcggcgcgccggacatggccctgccgcggatgaacaacttcagcttctggctgctgccggcggccttcggcctgctggtcagcaccctgttcatgcccggcggcggccccaacttcggctggaccttctatgcgccgctgtcgaccaccttcgccccgcacagcgtgaccttctttatcttcgccatccacctggccgggatcagctcgatcatgggcgcgatcaacgtgatcgccaccatcctcaacctgcgcgccccgggcatgaccctgatgaagatgccgctgttcgtctggacctggctgatcaccgcgttcctgctgatcgcggtgatgcctgtgctggccggcgtggtgaccatgatgctgatggacatccacttcggcaccagcttcttcagcgccgccggcggcggcgacccggtgctgttccagcacgtgttctggttcttcggccaccccgaggtgtacatcatgatcctgcccgccttcggtgcggtcagtgcgatcatcccgaccttcgcgcgcaagccgctgttcggctacacctcgatggtctacgccaccgccagcatcgccttcctctccttcgtggtctgggcgcaccacatgttcgtggtcggcatcccggtcaccggcgagctgttcttcatgtacgccaccatgctgatcgcggtgcccaccggggtgaaggtgttcaactgggtgaccaccatgtgggagggttcgctgaccttcgagacgccgatgctgttcgccgtggccttcgtcatcctgttcaccatcggcggcttctccggactgatgctggcgatcgccccggcagacttccagtaccacgacacctacttcgtggtcgcccacttccactacgtgctggtgcccggcgcgatcttcggcatcttcgcctcggcttactactggctgccgaagtggaccggccacatgtacgacgagaccctcggcaagctgcacttctggatgagcttcatcggcatgaacctggcgttcttcccgatgcacttcgtcggcctcgccggcatgccgcgacggatccccgactacaacctgcagttcgccgacttcaacatggtctcgtcgatcggcgccttcatgttcggcaccacccagctgctgtttctgttcatcgtcatcaagtgcatccgcggcggcaagccggcccctgccaagccctgggacggcgccgagggcctggagtggagcatcccctcgccggcgccctaccacaccttcagcaccccgcccgaggtcaagtgaggagcgcgccatgagcgatgccaaggtcgatacccgccgcctggtcggccgcctgctgctggtgaccgtgctgatgttcgccttcggcttcgccctggtgccgctctacgacgtgatgtgccgcgccctggggatcaacggcaagaccgccggcagcgcctacagcggcgaacagcaggtggatgtcgggcgcgaggtgaaggtgcagttcatgacctcgaacaatatcgacatggtctgggagttccgctccgccggcgaccagttggtggtgcatcccggcgcggtgaaccagatggtgttctacgcgcgcaacccgagcgacaagccaatgaccgcgcaggccatcccgagcatcgccccggccgaggccgccgcctacttccacaagaccgaatgcttctgtttcacccagcaggtgctgcaacccggcgagagcatcgagatgccggtgcgcttcatcgtcgaccgcgatctgcccaaggatgtgcggcacgtgacgctggcctacaccctcttcgatatcactgcgcggaagccgcccgtaccggttgcgggacgataaggagaacaacatggcaagccacgaacactattacgtccccgcccagagcaagtggccgatcatcgccagcatcggcctgctggtgacggtgttcggcctgggtacctggttcaacgacctcaccgccggccacaaggaatcccatggcccgtggatcttcttcgtcggcgggctgatcatcgcctacatgctgttcggctggttcggcaacgtcatccgcgagagtcgcgccggactctacagcgcgcagatggaccgctcgttccgctggggcatgagctggttcatcttctccgaggtgatgttcttcgccgccttcttcggcgcgctgttctacgtccgccacttcgccggtccctggctcggcggcgagggtgccaagggcgtggcgcacatgctctggccgaacttccagtacagctggccgctgctgcagaccccggacccgaagctgttcccgccgccgagcgcggtgatcgagccgtggaagctgccgctgatcaacaccatcctgctggtcacctccagcttcaccgtgaccttcgcccaccacgccctgaagaagaacaagcgcggcccgctcaaggcctggctggcgttgaccgtgctgctggggatcgccttcctgatcctgcaggccgaggagtacgtgcacgcctacaacgagctgggcctgaccctcggcgccggtatctacggctcgaccttcttcatgctcaccggcttccacggcgcccacgtgaccctcggcgcgctgatcctcagcatcatgctgatccgcatcctgcgcggtcacttcgatgccgagcaccacttcggcttcgaggccgccagttggtactggcacttcgtcgatgtggtctggatcggcctgttcatcttcgtctacgtgatctgaccgccaccgggggaatcagaaatgccagggcgcgtggctgttcagctcgccgctgtagaagccccaggcgaccagcgccagggtcgccgcggcgagcaccacgcggacggtcagcgaattgaccacgcgggaaccatggccctggtccttgaccaggaagaacaggccgctgaacaggctcaccagggtagccagcagtagcaggacgatcgccactttcaacatggtgggactccggcgatggggggattcatgcagtatagccagcgcctcggggaggccggacgcaatgacagacgcagcatgcgtggcgcgttccgccccggcctgctgccgaccctggtggtcctcggcctgctgccggtgctgctctggctgggcacctggcagttgcagcgggccgacgagaagcgcgccctgctggccagctacgaggcccggcgcggcgccgagccggtgtcgcccgggcagctagaggggctgcgcgacccggcgtacgtccgcgtgcgcctgcacggccgcttcgacgagcggcatacgctgctgctggataaccggctgcgcaacgggcaggccggggtcgaggtgctgcaacccttctacgaccaggccagcggcctctggctgctggtcaaccgcggctgggtcgcatggactgaccgacgctcgccgccggcgctggaaacccccgaccgcgtcctcctgctcgatgccttgacctacctgccgccacccggcggcctgcacctggccgacgcgccggccggcggctggccgcgcctggtgacccagctcgacatcccggcgctgtggcaggccttcggtcgcgccgggctgccctgggaaatccgcctggaaccgggcgacgccagcttcgacaccgactggcccctggtctcgatgccgccggagcggcacaccggctacgccgtgcagtggttcgccctggcgacggccctgctcgccctctacctctacctcggtgtgcgccgcgcacgggagaaaaaccatgagtctcgcgattccgatgcctgaacgtccgcgccgcgcccgtggccgcctgcaactgctggcgatcatcggcttggtggtggggccgatgctgctcgccagcgccatgtacaaatggaatttctgggttccgcaggggcgcagctacagcggcgcgctgatcggcaatggccagacccccgccgacctcggcgtgcagggacgcagccagggcgagcagtggcaactgctggtgaccgcgccgagtacttgcggcgaggactgccagcaactggtctacctggcccgccaggtcaacatcgccctcggccgcgaagcctcgcgcgccggccacgccctggccgccagtggcgagctgccggcggacttcgccaacctggtgaggcaggactacccgcgcctgcagcgctacggcctggaccctgtcctgtacgacaaggccggcggcggcgagcggccgctgctgtgggtggtcgacccgcacggcaacctggtgctgcgctacgacgccaaggccaacggcaagaagctgctgaaggacgtgcaactgctgctcaagctctcgcatatcggttgatcggcgtggccggcgcggttcccggcccgatgaggacagaacgacaagaaaaaggggcccgcgaatgacaggcgcaacccgcaaacccggtttcaccgtcgccgtgctggcgaccctgctggccgccgtggtggtcctgctcggcgcctatacccggctgacccacgccggcctcggctgtccggactggccaggctgctacggcttcgtccacgtgccgctgagcgaggcgcaactggcccacgccgaactgcacttccccgacgccccggtggaggcacagaagggctggaacgagatgatccaccgctatttcgccggcgccctcggcctgctcatccttggcctggcgttgcatgcgctggtccgccgcgggcgcgacggccaaccgctgaagctgccgctgctgctgctcgcggtggtgatcgcgcaggccgccttcggcatgtggacggtgaccctcaagctctggccgcaggtggtcaccgcccatctgctcggcggcttcaccaccctggcgctgctctttctcctcgccctgcgcctctccggacgcttcgcggcgcggcgctacccggcggcgacccgcggactggcggggctggccctgctcctggtgatcggccagatcgccctcggcggctgggtcagcagcaactatgcggcggtggcctgcatcgacctgcccacctgccatggcgagtggtggccgcggatggacttcgccaacggcttccacctgacccagcacatcggccccaactacctcggcggccagctcgacagcgacgcgcgcacggcgatccacatgacccaccggatcggcgcgctgtgcgtgaccctggtcctcctgctgctcgcctggcgcctgcagcgcagcggcctggtctggccgaccgcgctgatgctgctcggcctgtcgctgcagatcggcctgggcatcagcaacgtgctgctgcacctgccgctgccggtggcggtggcgcacaacggcggtggcgccctgctgctgctcagcctggtgctggtcaactatcgcctgcgcgcgccggccagcgtccgcgcgccggcaccgtcgccgcagcgcgtgcgccgcacgctgccgccggcgcaaggttcgcggctgaaggccgcctgacagacagaaggatggaggtaaggatatggccaccgtcatcgatcgccacagccagccgacctggcgcgacttcctcgaactgaccaagcccaaggtcgtggtgctgatgctgatcacctcgctgatcggcatgctgctcgccaccaaggcgccgctggatggcttcgtgccctggcaggtgctgatcttcggcaacctcggcatcggcctttgtgccggcgcggcggcggcggtcaaccatgtggtggaccggcgcatcgactcgatcatggcgcggacccacaagcggccgctggccgagggccgggtgtcgccgagcatggcgctgggcttcgcgctgctcctggcgctggccgggatggccgtgctgctggccttcaccaacccgctgacggcctggctgaccctcgcctcgctgctcggctacgcggcgctctacaccggcttcctgaagcgcgccacgccgcagaacatcgtcatcggcgggctcgccggggcggcgccgccgctgctcggctgggtcgccatcaccggccacctgagcgccgagccgctgttgctggtactgatcatcttcgcctggaccccaccgcacttctgggcgctctgcatccaccgcaaggacgaatacgccaaggccgacatcccgatgctgccggtgacccacggcgagcgctacaccaagctgcacatcctgctctataccctggtgctgttcgcggtgagcctgatgccgttcgtcatccacatgagcgggctggtctatctgctctgcgccctggccctgggcgcgcgcttcctcgactgggcctgggcgctctactgtgacagccggccacatgcggcgataaagaccttcaagtactctatcgtctacctgttcctgctgttcatggcgctgctggtggaccactatctgccgctgaagctgcttctctgatcccactctagagccttgcccacccatgactcgagtcaacaagaccgtcctcgtcctcgtcgccctggtcgccctggtcctcggcctcaccgtgcacaaggtgctcaccgcccagcgccaggccgatcccaccgtgctgctcgacgccggcatcgtgatcctgccgcagacgcgcaaggtgccggcgctggagttcaccaaccaggacggccaggcggtcagcaccgccagtctcaagggtcgctggcacctgctgttcttcggctacaccttctgccccgatgtctgcccgaccaccctcgcccagctccgcgaattgcagggcaagctgccgcaggaggtgcgcgacgacctgcaggtggtattcgtcagcgtcgatccgaaccgcgacacgccgcagcagatcaagcaatacctgggctacttcaacgccggcttccaggggctcaccggtactccggagaacatccagaagctggccaacgccatgagcatcccctacatccccgccgacaccagcaagcccaactacaccgtcgaccacagcggcaacctggtgatcatcggtccggacggcgagcagcacggcttcatccgcgcgccgctgaacaacgccaagctggaagcccaactgcccggcgtgctcaagccgcaggcctgattccctttccttcccccaccgtccgcggcgttccgggcctcaggcccggcgcatgccgatgtgcgggatgtcgtcttccaggtagacctcggtgaccgcgacgaagccatagcggccgtagtaggcctgcaggtgggcctgggccgagaggtacaccggggtgtccagccagaggcgctccgccgcctgcagcgcgcgttccatcaactggtgaccgagcccctggccgcgcgcggccgaggaactgaccactcggccgatcaccacctggccctcgtggcgaaccgggtccagcaggcgcaggtaggcgagcaactggccgtcgcgccaggccatcaggtgatgggtatcgccgaccaggtcgaggccgtcgacttcctggtaggggcatttctgttccaccacgaagacctcggtgcgcaattgcagcagcgcgtagagttccttcagggtgaggtcggcgtggtgcttgcaggtccagtcgagcgacatggtcgggattccgggacaggagacaggaacgcggttatgccatgggcggcgggccgctggaaaggcgtggccggtcggtttcgtttcagaacccacgcggctatcctttgccgaacggctggaggtgtctcatgcgttgggaagaactgagcgaacaaccctgttcgctggcgcgggtgctggcgatcctcggcgatcgctggaccctgctggtattgcgcgactgctttctcggcgtgcgccgtttcgacgacttcgagcgcagcctcggcgtgacccgccacgtcctcgccgaccgcctcaagcgccttgtcgaagcggagatactggccaaggtgccctaccaggaaaggccgctgcgcgaggaataccggcttaccgagaaagggatggaactgtacccggccatcctttccctggtgaactggggcgaccgccacctcgccggcgtcgaggggccgccactcgagcatgtgcacaagcattgcggccagcacatgcatggcgtgctggtctgttccgaatgcggtgagccgctgcacgcgcgggacgtgacggtacgcgaggggctgttctggaaggggcgcctgctgcggcgcggctgagcgttccaggcctggccgccgacgcgaatcggcggataaacgccgatggcgttacggcaggaaggacgctgtcgtaccaggctccgccgaccggtcccctctcttcagggagaggacgtgccgggcaggccgggacaggcagagtaattggtgcgcggatatcactcgagcccttgccagttgacaagttccttttaagaactaactatcgtctctattgggttctaaaaaagaactaacaagagaggcctctgcaatgacccagcgcaaagcggttctggtaatgggcgccggcgacgccaccggtggcgccatcgcccggcggttcgcccgcgagggctacgtggcgtgcgtcgcccggcgcaacgcggagaagctggagccgctggtgcaggccatccgcgaccaaggcggcgaggccctggcctgcggctgcgacgcacgccaggagcagcaggtgatcgacctcttcgcccgcatcgagggtgaggtcggtgcgctggaggcggtgatcttcaacgtcggcgccaacgtctggttcccgatcaccgaaaccaccgaacgggtctatcgcaaggtctgggagatggccgccttcggcggcttcctcaccggccgcgaggcggcgcgggtgatgctgccgcggcagcgcggaacgatcatcttcactggcgccaccgcctcgttgcgcggccgcgcgcatttcgccgcgttctccggcgccaagttcgccctgcgtgccctggcccagagcatggcgcgcgagctggggccgaagggcatccacgtcgcccacccgatcatcgacggcgccatcgacaccgacttcatccgcgaaaccctgcccgagctgtacaagcgcaaggagcaggacggcatcctcgatcccgagcacatcgccgagacctactggcagatccactgccagccgcgcgactgctgggtgcacgaactggacctgcgcccctggatggaaaccttctgatccccgccacggaaagagccacgcatgagcaagcaaatcgagttcttcttcgacttcggcagtcccaccacctacctcgcctggacccaactgccgcgcatcgccgccgcccatggcgcgagcatcgcctggcggccgatgctgctgggcggcgtgttcaaggccaccggcaaccattcgccgatcgaggtgccggccaaggggcgctacaccctccacgacctggcgcgctatgcgaaacgctacggcgtgccgctggccttcaacccggccttcccgatcaacaccctgacgctgatgcgcggcgcccagggctatctcggcggcgaagggttccagccctacctgaaagcggtgttcgaagcgttgtgggtacgacagcagaacctcggcaagcccgaggtggtcgcccaggtgctggcggaggctgggttcgatccggatgagttcctccgcctggttggcgacgagcaggtcaaggaggggctcaaggcgaccaccgaagaggcggtgcggcgcggcgtcttcggcgcgcccagcttcttcgtcggcgaccagttgttcttcggccaggatcgcctcgatttcgtcgccgaggccctcgccggctgacctccccttccccgcggcgagccgctctggcccgccgccttgcgccatccgagcgccctcctcccggctgcggcccgcgcgtgccgtggttcctggccattcgtcgcgcccgccgatagcggcttgtcaggctgacttctttgcgtataggctgaactggtcagaccggtaataccacaataaaaatgcgttcatcgcccgcctccgcgaggcccgatggaagcgccgaatggagactcctgcgatgttcatcaagcgctgttcccgctcgatattcctgcaagtcgtgattggcctggtgataggcgtgatctgcggggtcggcattcccgacctggccgtgcagatgaagccgctgggcgatggcttcatcaagctgatcaagatgctcatcgcactgatcgtcttctgcgtggtggtcaacggcatctccggcgccggcgacctgaagaaggtcggccgcatcggcctgaagtcggtgatctacttcgaaatcctcaccaccatcgccctggtcctcggcctggtggtcgcctacagcctgggcctgggcagcggcgccaacatccatctcaacgaactgcccgccggcgacgtcgccctgtataccgggcgcacccaggagatccacggccccgtggcattcctcatgggcctgatcccgacctctgtgttcagcgccttcgccgagaacgacatcctccaggtcctgctgttctccgtgctgttcggcagcgccctgaacctggtcggcgagcaggccagcggcgtggcccgcctgatcaacgaattcagccacatcgtgttccgcatcatgggcatgatcgtgcgcctggcaccgctcggcgtgttcggcgcggtggccttcaccaccgcccgctacggcgtcgactcgctcagccacctgggcgcgctggtgctggtgttctacgccacctgcctggtcttcgtcatggcggtgctcggtagcgtcctgcgtctctccggggtgcgcatgctgccgttcctgcgctacttccgcgaagagctgctgatcgtgatgggcaccgcctcctccgacgcggtgctgccgcaggtgatgcgcaagctcgagcacatgggcatccgcagctccacggtaggcctggtgattcccaccggctactcgttcaacctcgacggattctcgatctacctgaccctggcggtggtgttcatcgcccacgtcaccggcacgccgctggcgatgaccgacctgatcaccatcctgctggtttcgctggtcacctccaagggcgcccacggcattcccggctcggccctggtgatcctcgccgccaccctcaccgcggtgccggcgatcccggtggccggcctggtgctggtgctttcggtggactggttcatgggcatcggccgcgcgctgaccaacctgatcggcaactgcgtggccaccgtgaccatcgcccgctgggaaaacgacatcgatatgccgcgcgcgcaggccatactcgacgggcgcctggaggcgccggccaaggccgacggcgagccgctcaagcgcagcgcggtggccggggaaggcaagctgcatggctgacgcgccgaggcgcgttgcacgtccgattggcaagtaaagggaggcgacatgttttcttcgtccaagctggtcaacgcggttgcccagcgcctgctcgacaccatcgagcagggtcgctgggtcgccggccagatgttgcccggccagcgcgagctggctgagcagatggaaatcagccggccgagcctgcgcgaggcgatcatggtcctggagaccctgggcgtggtccgttcgctgccgggcaagggcgtgatggtcctcgaacgcagcgaaccgctgcgcgaggtcgcggcgcccggcgaggcgaccatggaagacgtcctgcaactgcgctatgcgctggagccgttcatcgtcggcatcgtcgcgcagagcgccggggcggcggagatcagcgaactgcggctgttgctgctggacctgcgcgaagcggtcgaggatggcgacccgcaggctctggttgaggcctacacggccttccaccggcgcctggtgaagctcacctcgaacccgatcttcctcagcgtttccgaacagatcggcagcgccctggaacgcagcgacaacctggtgcgccgccagccggaatacgccgaggagatcctccaggaacacgacgccatcctccgtgcgatccgccagcacgacagcgagcgggcgagccaggcgatgcgccagcacatcctcaacgaaggcgcgcgcctgaacatcgacctgcgcttgccgcaggtctgatcgcccgcgccagggttccaacccgggaccgtcgcggcgcccggacggctttcgtccgccgcctgcgaaggcccacaagcacgactcgacaggtgtgaacatggtcggattcgaagcacgtacccagcagggcgccgcgctgcgccccaccagccatttcgtctacgaaagcatctacacggcaatcctggaaaagcgcctggcgccggccgccaagctgagcaaggaaaccctcgggcagatcttccgggtcagcaacggtaccatccagcgtgccctcacccgtctcgccgaggacggcgcggtggtgatgccgccgaaggaggtcgccagcgtcgcccgcccggacgagcgccaggcgcggcaggtgctggacgcgcgcctgctggtggaaagcgaagtggtgcggcaactgcccgcggggctggatcccgccgcccttgccgagctacgggcgctggtcgacgaggagcaggcttgcctcgcggcccgcgacagcgccgggctgatccgtctcgccgggcgcttccacctgcgcctggccgaactgaccgagaatcccttgctgcagggtttcgtccgtggcctggtggcacgcgcctcgctggacatcgcgctgaacaagggggcggtctataccgccgaggcctgcgccgcgcagcgcgccctgctcgatgccctggaggacggcgacagcgcggcggcggctgcgctgatggacgcttacctgcgaggcctgttcgcccgcatgcgcttcctgccgccacccaccaccgacctgcgcgaggcattcggcatgaaggcccctcgcggggaaaaacgccggagggcctgacctccccggccgccgcctaccagatctggcaggcggtggtggctggtggccagcctatagtgaagcgggtcagggatggcgccgtgctggtcgaagtagccaagggtccgttgtgagcgcccggtcctgtccgtgacgtcctacaggaagctgtgaacgcatggttaacggagatcgacatggcatacgcagaatggatcgcagtgaaggtcgtggtatccaaatccatcggcacggtgggcatccgcaacgccaccttgcaatggggcaagttctaccgctacaccaacaaggacgacgagatttccaccgaggaagtcagcagcatgaacgtgcaggccggcagcccgcaatggatcgcctcctgcggacgggagaacgcttcgtccggcacccagggcagcttcgactgctacgacggcaacaccaagatgggcaccttcagctgggatgacccgtggaaatccggcgccaccaacacctggagcttcacgccggcatcggcggactatgccggcatcaccagcggcggcaacgctacgggcacggacatcggcgaggtcaccctgaccctcggccgcttctcctgacggtacctggagctggccggcagtccgtcggtcagctccagcgctcatccccgtccgtggcgaacgctcgccgcagcgcctcgatggcgaccttcaccttggccggctgggcctcgcgccgtggcgtcaccgcatagatgccgagcccgggaatcctccactccggcaatagctgttgcaggcgcccgtcgttcagcgcgtcgcgcacctccggcagcggctggtaggacacgccgagtccgtcgagggtgaactggcgcaccgcgagcatcccgttggcggccacccgtggctccaggcgcagtttgcagacttccccgcccggcccgctgagcgtcaggtggttgaggtggttcgaggtgttcagggaaatccagtcgacctcggtcaactgctccggacggttgatgggcgcctgttggcgcaaataggccggcgccgcgcagagcacgctgctccaatcgccgaggtggcgcgccaccaggctggagtcggcgagatggccgacgcgtatcgccaggtcgatgcgctcggcgaccagatcgatgcgctcgtcctggaagaacagctgcaggcgcaactggcggtggttctccagcaacggtttcagcgcctgggtgatcagcgtgccggagaaccccaccggcgccgccaggcgcaactcacccaccggcgcatcgcgccattcgccaagccgccgctcggcttcctcggcgatcgccagcatctgcgcgcaactgcgatagaacgcctcgccggcctcggtcagggtcagccggcgggtggtgcgatgcagcaaagtgacctgggcgcagctctccagcttgcggatctgctggctgactgccgaaggggtcatgcccaggctctgggccgcggctgccatcgagcccttgtccaccacagtggcgaagatcgccatgcctttcagcgaatccatgccggttcctccttgcgggagactgcgcctggggaaaaatcaccggaaaaagcgcgagaaagcatgcccagcgggcgaggtcgtcgagttacggaaaaatacggacgcgtatgggagcgaagcatgagtcagccaaagaactaatcaggtcgcagtggtcgcatgttggtcgctctcattggtcaggtcgaaaaatgtccattttttatgagttatggattttttgtccgaagtaagctactcagtacaagtcaagggaaacattcattttgaaacatcttgtaaccgtgtgaccactttcagggggtaatttcgaccctgtcgatgcgcaaaatctggatttccttgcctttaacccgaaacggggcgctgaacggccagcgctccagggtcagggtgcgtacgcctggcacctcgctgggccgccctgccccctggttggctacctgctgcagcggtttcacctgctcgacgatgtcctgaacggctttcagagctttttccgggccgatcagcacgacgtaatggtcgtagatggcgtccaggtcggcggccgccttgcgggtccacttcaggctcattgcagcccccagcgcttctcgatctcggtgtgttccagcaggcgaccggcattggcatcggccaagccttcatcgatggcagcgacctgccactgctgcctttccaggtactgcgcgagcgcctgccgcaggtggtaggggcggtcgcggtgggtggcgcgggccagttcgtcgagggccgcgaccagggcgtcatcggcgcggaacgagactacggtgctcattttctgatcagcttcgttttcgatgtatacggtgtttacagtgaaaacgaatgtatacgaaagctttcgggcgagcaatcgcccggctgtttcgtccgtcgaaaaaacctttatcgatcagtgggttgaatgaggagcccgccccgagcggggcgggcggaaggacggcgtgggattaccaggcctggttgaagtggaagccctgcctgggcgagaagcgggtgttgacgagcttgtagccttcctcgccgcgtggcttgaccagcgagacctggccgacctgcggttgggtgatctgttgcagggtggtcaggctggcctgcttgagcacctcggggttcttcgcccagtccttcacttcgcgtggcttgacctcgacggtgaccaaccagcccttttccacggccgggccgtagtcgtcgggcttggcggggtccaccgaacggacgctgacgtcgaagccgctgctgtagcagaaggccttcgactcgggcttgtagtcctcgcggccggcgggcgtgaggtcgtaggaatcgccgtcgcggcgcagcaggccgacgccgaccagcgcgtcgtagaccgcggcgttgcctttcgccgggccggggccggagaagctgtcggagagcgtcaccgggaacgtcttgaacagggtggagctggcgcaggcgggtttgtcgaagccgcgctcggcgagcaggcgggcgatctcctcgctggacggagcggagtccgagcaggcggcgaggaacagtgggagggcggcgacgaggccgcgcagaacgcgtgtaggcatgggcatgtcctttgtccattggcgcagccggatcggctgcgcggcgaattctagcggctgtggcaccatgggcgcacattcgacccaaggaggagaacccatgcgcctgcctgcgaacctcggccgcctgctgccggccctgtgcctgggcgtcctgttgagcgcctgcagcaccttcggccagcgcgatccgttgcgtatcgacctggtcggcctggaacccctgccggggcaaggcatggaaatgcgcttcatggtcaagctgcgggtacagaaccccaacgacgagccgatcgaatacaacggcatcgccctcgacctcgacgtcaacggccagcccctggccagcggcgtcagcgaccagaccggcgaggtgccgcgcttcggcgagcgggtggtgagcgtgccgctgaccgtctccgccttttccgccttccgccaggcctggggcctgagcaacaacgctccgacccggggcatgccctacgtggtgaagggcaagctcgccggaggcctgttcggcaccgtgcgcttcagcgaaaagggcaccctcgacttctccgggccggccgtcggcgcgccgaagaccaaggggctctgaggcggttcggcaggggagcgagaaaccctatataatctgcggttttcgtccccctgctgaagagagaatgccgtgagcacgctgccgccctgtccccaatgcaactccgaatacacctacgaggatggtgcgctgctggtctgcccggagtgcgcccatgaatggtcgccgaacgaggccgctacggcgtccgatgatggcaaggtgatcaaggattcggtgggcaacgttctccaggacggcgataccatcaccgtgatcaaggacctgaaagtgaaaggctcctcgctggtggtgaaggtcggcaccaaggtgaagaacatccgcctggtggacggcgaccacgacatcgattgcaagatcgacggcattggcgcgatgaagctgaaatcggaattcgtcaggaaggtctgagacgaccttgcctgaagaagcccggccattggccgggcttttctttggagggctgtctgggttcttcccccggtggtggactcagacccgcgccgtcttcccggcgtagtcctcgccgaggcgcggcttgcgtcgcgcgttgagcagcccgaggcagacggtgaagatcgtcagcagagcggtggcgaacacctcgtgacggtgctccggcatgatcagcatgatgctcagcgcggcgacgatgaacaggatcaccgcccaggtcagccagggatacagccacatgcggaactcgatgggctggccgctggcctgcaattgcttgcgcatgcgcaactgggccacggcgatcaccaggtacaccagtagcgccacggcgccggagctggcgaggaggaaggtgaagaccttctccggtgcgaagtagttgacgatggtggtgaggaagcccaccgcggtgctggccagcaccgccgggcgtggtacgtgggcggtgttggtcagcttgagcacgcttggggcgtcgccgcgcttggccagggagaagaccatccgcgacgaggtgtagatcgccgagttcaggcaactggccacggcgaccagtaccaccaggtcgacgatcagcttggcgtgcgggatgtccagcagctccagggcgcgctggtaggagccgacctggatcagcagcgggtcgttccacggcacgatggagatcacgatgaagatcgacaccaggtagaacaggccgatccgccagatcaccgagttggtggcgcgggtgatctgcttcgccgggtccttggactcggcggcggcgatggtgacgatctcggtgcccatgaagctgaacatggtcgtcagcagggcgccgagcaccgcgccgtagccgttcggcacgaagccgccgtggctcgccatcaggctggacaggccgctgacctcacgctccggcaggccgccgacgatggccaccgcgccgagcacgatgaaggcgatgatggcgatcaccttgagcagcgcgaaccagaactcgaactcgccgtagcgggccacgctgaagagattggtgacggtgagcaggaaggtcaccgcgagggcgaagatccaggtgtcgatggccgggaaccaggcgttgaggatggccgcggcggcgatcgcttcgagtgggatcaccagcacccagaaccaccagtagagccagccgatggtgaaaccggcccagcggccgatggagcggtcggcgtaggtggagaaggaaccggtatcgggggaggcgaccgccatttcgccgagcatgcgcatgaccagcaccaccagggtgccggcgatcaggtaggcgagcagggcggccgggccggcggcggcgatggcatggccggagccgacgaacaggccggcgccgatcaccccggcgatcgacagcatggtgacgtggcgttgtttcaggccgggcgcgagcgaggcgttgcgcttgttcggcagttgtgaagccagtacgactttggacatcgttgagaccctttaattgttcttgggcaaggtctgggccgccttgtgggcgacgccatgggtgcggccgtgggtgaggtttcacggcggtggaacgttgcggactcctgattgcggaaaaagaaaaaaggcatggtcgttaccgaccatgcctgtcgtcgtcagccttcagaggctggggaaggcgaattgcgaggcctcgtggctggcccgctgcggccagcgctgggtgatggccttgcgccgggtgtagaagcgcacgccgtccgggccgtaggcgtggaggtcgccgaacagcgagcgcttccagccgccgaagctgtggtaggccaccggcaccggcagcgggacgttgacgccgaccatgccgacctcgatctcgtcgcagaacaggcgtgcggcctcgccgtcgcgggtgaagatgcaggtgccgttgccgtattcgtggtcgttgatcaactgcatggcctcttccaggctgttgacgcgaaccacgcacagcaccgggccgaagatctcttccttgtagatggtcatttccggggtcacccggtcgaacaggctgccgccgaggaagaagccgttctcgtggccggcgacctggtagccacggccgtccaccaccagctccgcgccctgggccacgccgctgtcgatgtagccggtgaccttggcctgcgcggcggcagtgaccagcgggcccatgtcgaggccgcaggaagtgccggcgccgatcttcagcgccttgatctgcggaaccagcttggcgatcagcgcgtcggccacctggtcgccgacgcataccgccaccgagatcgccatgcagcgctcgccgcaggagccgtaggcggcacccatcagcgcgctgacggcgttgtcgaggtcggcgtcgggcatcagcaccgcatggttcttcgcgccgcccagggcctgcacgcgcttgccgcgcttggtgccctcggcatagatgtattcggcgatgggggtcgagccgacgaagctgatggccttcacttccggcgcctggagcaggccgtccacggcttccttgtcgccgtgcaccacgttcagcacgcccttcggcaggccggcttcgtggaacagctcggcgatcagcagggtggagctggggtcgcgctcggagggcttgaggatgaaggtgttgccgcaggcgatggccagcgggtacatccacagcggcaccatcgccgggaagttgaacggggtgatcccggcgaccacgccgatcggctggaagtcgctccaggcgtcgatgttcgggccgacgttgcggctgtactcgcccttgaggatttccggggcggcgcaggcgtactcgacgttctcgatgccgcgcttgagttcgccggcggcgtcttccagggtcttgccgtgctcttcgctgatcagcttggaaatccgcgcctcgttctgctccagcagttgcttgaagcggtacagcacctgtgcacgcttggccggcggggtgttgcgccaggccgggaaggcggccttggcggcatcgatggctttctgcagggtcttgccgtcggccagcgggaccttgtggatggcttcgccggtggaggggttgaagacgtcggcgctgcggccgttgtcggcgaccatttcgccgttgatcaggtggtggagggtgcccatcttgtcttgttctctcttcgctaggggtgacgaaagggccgtggccctttccctttacccgctccctggggagcgggtgcggattacttgatctcggtctcgacgaagaccacttcgtgtgcgctggcgttgatcacgttgtgctcgacgccggccttgcggaagtaggcctgtccggcgaccagcggcgcatggcggtcgccctcgggggtttccagcagcagcgtgccgtcggtcagcggtaccaccacatagtcgtggccgtggcggtggcgcccggtttccgcgccgggggcgaagcgccattcggtcacgatcacctcggcgttgtccacctgcacggtgggtacggcttgcgggcggccgctcatcaggcgatgccgttgagcgcttcgccgaccgcgtcgaacaggcggtccagctcttccggcctggcgttgaaggtcgggccgaattgcagggtatcgccgccgaagcgcacgtagaaaccctgttgccagagcttcatgccggcctcgaacggacgtacggtcggatcgccgtcgcgcggggcgatctggatcgcgccggccaggccgcagttgcggatgtcgatgacgttcttcgcgccttgcaggccgtgcaggcccttctcgaagtgcggcgccagctcggcggactgctgcaccaggttgtccctggccaggatgtccagcgcggcgaggccggcggcgcaggcgaccgggtgcgcggagtaggtgtagccgtggctgaactccaccgcgtgctcgggcagcgcctggttcatgaaggtgtcgtagatctcgctgctggcgatcaccgcgcccatcggcacggcgccgttggtgacctgcttggcgacgttcatcaggtccggggtgacgccgaagtactcggcgccgctgtaggtgcccaggcggccgaaggcggtgatcacctcgtcgaagatcagcaggatgttgtgctggtcgcagatctcgcgcaggcgctgcaggtagccgaccggcggtaccagtacgccggcggagccggacatcggctcgacgatcaccgcggcgatgttcgaggcgtcgtgcagttcgatcagcttgagcagctcgttggccagctcgacgccgccggtctgggccatcccgcgggtgaacgccatgcccggttgcagggtgtgcggcaggtggtcgacgtccatcagctggccgaacatcttgcggttgccgccgatcccgccgaggctggtgccggcgacgttgaccccgtggtagccgcgggcgcggccgatcagcttggtcttctgcggctggcctttcaggcgccagtaggcgcgggccatcttgatcgaggtgtcggcgcactcggagccggaaccggtgaagaacacgtggttcagttcgcctggcagcaacccggcgatcttctcggccaactggaaggacagcggatggccgtactggaagcccggcgagtagtcgagggtaccgagctggcgagccaccgcctcctggatttccttgcgcgagtggccggcgccgcaggtccacaggccggacaggctgtcgtagaccttgcggcccttgtcgtcggtcagccagctgccttcggcggcgacgatgatccgcgggtccttctggaagttgcggttggcggagaagggcatccagtgggcgcgcaggttgagttcgctggaaaccggcggggccacgttgagcggctggttcatcgttcgatcctcgggctttcttgttggaaggttccgcgcacgcggcggcggagcgttggatcaagcttggccctgacgaaaggttagataaagcttattcttctcacgtttagtttcgactgggtaaaacaataatggccaaatcccgcaacccgtcgctcggccaggtcagcgatttcgatatccgcctgctgcgcatcttcaagaccatcgtcgagtgcggcagtttctccgccgcggagagcactctcggcctcagccgctcggcgatcagcctgcacatgggcgacctggagaagcgcctgggcatgcgcctgtgccagcgcggccgcgccggcttcgccctgaccgacgagggccgcgaggtctatcgcgcgacccagaccctgctggcggcgctggaggggttccgcgccgaggtcaacgacctgcaccagcacctgcgcggcgaactcaacatcggcatcatcaacaacctggtgaccctgccgcagatgcgcatcacccacgctctcagcgcgctcaaggggcagggaccgcaggtgcggatcaacatcggcatgaccacccccaacgagatcgaactgggcgtgctcgacggccacctgcatgtcggcgtggtgccgttgatcagtccgctgtcggggctcgagtacctgccgctgtatgacgagcacgcgcagctctattgcagccgcggccacgcactgttcgagcgcgccgacggcgatatcgcggtggacgaggtgctcgccgcggacgccgtggcgcccagctaccgcctgcccgccgaagcccaggcgcgccaccaggagctgaacaacagcgccagcgcctcggaccgtgagggcatggcattcctgatcctgaccggcaacttcatcggctacctgccgtcgcactacgctgccgactgggtcgccgccgggatgctgcggcccctgctgccggagcgtttccactatgccatcgcgctgaccatcgtgacccgcaagggacgccggccgaacctggtgctggagcgcttcctggaggcggtggcggtgtcgtgagggcgcggatggagtaacgcgagcttcggccgcccgccgaacggcgtcttttctctacggcgcgaggaggtggcatgcagcgacgggccgagccaacgcgggaaagagactctcaccccttcacatggcgccgctcccccatcacccaggtctccgccaccgcgcggtcgtcgcccagggtgttcagcacgaacagggtatcggccaggccgcgcgcatgctccatgcgctgggcgatcatcggcgtggcggccaggtcgagggcgacgaagtcggcttcgcggccgggcaggaagttaccgaccaggccgtccaggtcgagcgccctggcgccgccgagggtggccaggtagagcgcctggaacggatcgaggctggtgccgcgcaattgctggatcttgtaggcgtcggcgaggttggccagcagcgacaggctggtgccgccgccgacgtcgctgccgatgccgacgcggatgccgtattgctgggcgcggccaaggtcgaacaggccggagccgatgaacaggttggaactgggacagtgcgccagcgccgcgttcttgtgcgccaggcagcggcattcgcgttcggagagatggatgccatgggcgaacacgctgcgttcgccgaccaggccggcgcgatgatagacgtccaggtagtcctgcgcctggggaaacagctcgccgacccaggcgacttccttgaggttctccgaaagatgggtgtgcaggtagacgccgggatactcgtccagcaggcgcgccgccgcggccagttgctcgggcgaggaggtcggcgcgaagcgcggggtgaccgcgtattgcaggcgcccgttgccgtgccagcgctcgatcagcgcgcggctctcggcgtagccactggccgcggtatcgcacagcgccggcggcgcgttgcggtccatcagcaccttgccggcgatcatccgcaggcggcgcttctgcgcggcctggaagaatgcctcggcggataccgcatggaccgtgccgaacaccagcgcggtagtggtgccgtggcgcagcagttcgtcgaggaacagctcggcctgggcggcggcgtagccggcatcggcaaagcgctgctcggcgggaaaggtgtgggtttccagccagtccagcagttgggtgccgtaggaggcgatcactccgagttgcgggtaatgcacatggcagtcgacgaagccgggcagcagcaggcgctgcggatgctcctccagcggcaggtcggcgggcagttgcggcagcaggtaggttgcgtgatcgagcgcgcgcacgtggccgtgttcgatccacagcaggccgtcctcgaaatactcccaggccttgtcgccgagtttcgccgggtcgccgaggaaatgcaggatccgcccgcgatgggccgaactgctcatcgcgctcccgccgtggtcggagtgcaggataagtggggggacgaagttgccagcaggtactgcatcgttcatctcctctgctgccggaatggcgctttcgcctctttagtccgggaaatcgacggaaatatcccgtctttggcgcgtgatctcgcttccgccattatgcactgtgcgcatgctgtggataagtctgtgtgtagcgcgtgttcggagagattgcacgagccattgcgggatgtgcccatctggctgccggcaggcgatccgcgaaaagcgttccggcaccttgagtccgccttgcgaaatgcccggtcggcaactggcgcttctgtgggtttgtctgtggaaaagctgttcgcattccccgttgaaaaaatgccttcggcggtcgggggaaaggcattggacggagccgcagaatttctcccggttggcgaaagagccagggaaaaggtgctgtggaatgcgccacgacggtgcatcgcgaaactgtggacagcggatccacccatggcgccgccgagcatgcttccgtcgatcgccgcggactttcctggaaagccggaaaacccagtatccatgggcatcatggcgtctaaaggggaagtcctggagacattttcacgggcattcccgttccgcgggtttcctgtggaaaagctgttggcaaactgtgccggaagcgggccgccggggctgccccagggattcggccgacccgtggcttggccgggagagatcgtcctgccgtgctcctccgaacggctgtcgatatcttgtggataaagctgttggcaaagtgttggaaaaaatgccttgccaggtcgcgcccatggcctgccgggttggctgttttctgtccatcgccaatgttgcgaaaatcgccaggacgatcggcgcgggaggcttcccaaggtcccggatgggctcccgacacgctgtggataactctgtgagcaaggtggtgatgactgttttgcgacaaatgctcacgcgggtgcgccgcagggttgcccgcaaatgtgccgcggcgtcccaggcgtgctccggcttggtgccgctcggcgcggcagcctggcccgtggctcccggcgcaagccgcgttccagggctttcctgacctcctggccaggtatttgcaccggccgtggcatcgtcgagcaaccgaccgggtccgccatgtccgcacctacctccttcgcgccgccgcgcctcgaactgcgcgggatcagcaagcgctatccgggttgcctggccaacgaccgcatcgacctgtgcatcgacgccggcgagatccacgccctgctcggtgagaacggcgccggcaagagcacgctgatgaagatcatctacggcgtgacccgtcccgatgccggcgagatccgctggcagggcgagccggtgcaggtgcgcgacccggctcgcgcccgggcgctggggatcggcatggtgttccagcatttctccctgttcgagacgctcagcgtggcggagaacatcgcgctcgccctcggcgccgaggcgggcagcccgcgccggttggaggcgcgtattcgcgaggtgtcgcagcgctacggcatgccgctggagcctcgccggctggtccatgggctgtccatcggagagcgccagcgggtggagatcgtgcgctgcctgatgcaggacatccgcctgctgatcctcgacgagccgacttcggtgctgaccccacgcgaggccgaggatctcttcgtcaccctgcgccgtcttgcggaagagggctgcagtgtcctcttcatcagccacaagctggccgaggtccgtgcgctctgccagcgcgccacggtgctgcgcggcggacgggtggccggacagtgcgtgccggcgcaatgttccgatctcgagctggcgcggctgatggtgggcgacgccgagggcctggcggcggagtatccgaaggttaccggcggcgcgcctttcctccaggtgcgcgacctgcactggcgcaacccggaccccttcggcgtgtccttcgccggcctcgatctggaggtgcgcagcggcgagatcctcggtatcgccggggtcgccggcaacggccaggacgagttgctcgctctgctcagcggcgaagtgcgcctgccgcgcgcccaggccgagcgcatccgcctcggcggctgcgccggcgcgcacctggcgccggatgcgcggcgccgcgccggccaggccttcgtgcccgccgagcggctggggcacggcgcggtaccggagatgagcctggcggacaatgcgctgctcaccgccttccagcagggcctggtgaagcgcgggttggtccggcggcgcaaggtgctggcgctggccgaggagatcatccgccgtttcgccgtgaagaccccgggtgccggggcgccggcacgcagcctttccggcggcaacctgcagaagttcattctcggccgcgagatcctccaggccccgcgcctgctggtggcggcgcatcccacctggggcgtggacgtcggcgcggcggcgctgatccaccgcgcgctgatcgccttgcgcgatgccggtacggcgatcctggtggtctccgaggacctcgacgagctgttcctgctcagcgaccgcatcgccgcgctgtgttcgggtcggctgtgcccggcggtcgccaccgcgagcgcttcgccgcagcaggtcggcggctggatggccggtcaattcgaggcgccggcggcagtcgccggcgccgttgcccaagggagcctgtgatgctgttgtccctggaaccgcgcggccgacagtcacgctggatgctgctggcctctccgctgctggcggggctgctgaccctggtctgcggtgcgctgctgttcgcctgtctcggccacgatccgtggcagaccctgcataccgtgctggtacagccgctcagcgacctctatgggctcggcgagctgctggtcaaggccatgccgatcctgctctgtgccctcggcctggcactggcctaccaggcgcgcgtgtggaacatcggcgcggagggccagttgctggtcggcgccctggccggcagcgcggtggcgatccagttgctcgactggcagagccgctgggcgctggcctgggtgctgctcgccggcaccgctgccggggcgctctgggccgggttcgccgcctggctgcgaacgcgcttcaacgccaacgagatcctgaccaccatcatgctcaactacatcgcgctgaacctgctgctgtacggcgtgcacgggccgttgaaggacccggatggcttcaacttcccgcagtcggcgctgttcggcgaggccagccgcctgccggcgctgttcgaggacagccgggtgcaccttggcgcattgttcggcctgctggcgctggcggcggtctgggtgctggcgcagcgcagcttcctcggtttccaggtccgcgtgctcggcctcgaccgccgcgccgccggtttcgtcggtttccgcgagaagcgcctggtctggttcgtgctgctgttctccggcgcgctggcaggcctggccggcgtctgcgaggtcgccgggccgatcggccaactggtgccgcaggtctcgccgggctacggctatgcggcgatcaccgtggccttccttggccgtctcaatccgttcggcatcctctgcgccagcctgctgatggcgttgctctacctcggcggcgaggccgcgcagatgagcctcaacctgccgttggcgctgaccgggctgttccaggggatgatgctgttcttcctcctcgcctgtgacgtgctgatcctctaccgcccacgtttgcacggacgctggcgcaagcgcccggcgctgcgcgacgccctggcctgaccgaaccgccgaggaaccacgatggatatcgatctgctcgacaacctgctgttcgccatggtccgcaccggtactccgctgctgctggtggccctgggcgaactggtctgcgagagaagcggagtgctcaacctgggccaggaggggatgatgctgttcggcgcggtgatcggcttcatggtcgccttctccagcggcagcctgtggctcggcgtgctcctcgcggtgctcgccggcatgctgctggcggcgctgttcgccggggtcgccctgtacctgaacgccaaccaggtggcctgcggcctggcgctgaccatcttcggcgtcggcctttcgtcgttcgtcggcgccgcctgggtcggcaagccgctgcaagggttcgccccgctggcgctgccggtgctgggcgagttgccgctgctcgggcgcatgctgttcgcccaggacgcgctggtctacctgagcctggcgctgttcgccgcggtcgcctggatgctcctgcgcagccgcgccgggctggttctccaggcggtcggcgagaaccctgacgcggccagcgcgatgggcctgccggtgctgcgcgtgcgcaccctggcggtgctcttcggcggcgccatggccggcctggccggtgcctacctgtcgctggcctacacgccgatgtgggcggagaacatgaccgccggacgcggctggatcgccctggcgctggtggtcttcgccagttggcgggtgttccgcgtgctgctcggtgcctggttgttcggcctggccagcatcctgcacctggtggcccaggggatcgggctgtcgattccggccaacctgctggcgatgctgccctatgcggcgaccatcctggtgctggtcctgctctcccgcgatgccctgcgcacccggctgtatgccccggtttccctgggccagccgtggaaggccgggcactgacgagggcaggttcttcgattagttgttttaactatttatatattcttcgatagatttagataatttcactgatggcctaaatcaatggggcatttttgccgaaccccgttaagattctcccagtcgatttgaaacaccccattcaactgagagaggaacgactgatgtccctgatcaacactcaagtccaaccgttcaaggtcaacgctttccacaacggcaagttcatcgaggtgaccgaggaatccctgaagggcaagtggtcggtcctgatcttcatgccggctgccttcaccttcaactgcccgaccgagatcgaagacgccgccaacaactacggcgagttccagaaagccggtgccgaggtctacatcgtgaccaccgacacccacttctcgcacaaggtctggcacgaaacctccccggcagtcggcaaggcccagttcccgctgatcggcgacccgacccaccagctgaccaacgccttcggcgtgcacatcccggaagaaggcctggccctgcgcggtaccttcgtgatcaacccggaaggcgtgatcaagaccgtcgagatccactccaacgagatcgcccgtgacgtcggcgagaccgtgcgcaagctgaaggccgcccagtacaccgccgcccacccgggcgaagtctgcccggccaagtggaaggaaggcgagaagaccctcgctccgtccctggacctggtcggcaagatctaagaccgcgccggcggcattcgccgccagcctctccggcggacgatccctcgcggatcgtccgcccttcacccagccaacgcgccgtgcagggcggatgtcccatccgccggggatacgtttgcccgaatttcgaggagctgaaccatgttggacgccaatcttaaaacccagttgaaggcctacctggaaaaggtcagccagccgttcgagatcgtcgcgtccctcgatgacagcgacaaatcccgcgagctgctgggcctgctgcaagacatcgtcggcctgaccgacaagatcaccctgaagaccgacggcagcgatgcgcgcaaaccgtcgttctcgctgaaccgccccggtgcggacatcggcctgcgcttcgccggtatccccatgggccacgaattcacctcgctggtgctggccctgctgcaggtaggcggccacccctccaagctcgacgcggacgtgatcgagcaggtcaagggcatcgagggcaccttcgagttcgaaacctacttctcgctgtcctgccagaactgcccggacgtggtccaggcgctgaacctgatggccgtgctcaacccgaacatccgtcacgtcgccatcgacggcgcgctgttccaggatgaggtcgaggcgcgccagatcatgtcggtgccgagcatctacctcaacggcgaagtcttcggccagggccgcatgggcgtggaagagatcctagccaagatcgacaccggcgccgccgcccgcgacgccgagaagctgaccgcccgcgacgccttcgacgtgctggtggtcggcggtggcccggccggcgccgcggcggcgatctacgccgcgcgcaagggcattcgcaccggcgtcgccgccgagcgcttcggcggccaggtgctggacaccatggccatcgagaacttcatctcggtgcaggagaccgaagggccgaagctggcgcgggcgctggaagagcacgtgcgtcactacgaggtcgacatcatgaacctgcagcgcgccagcaagctggttccggcgaagaacaccggcgagttgcacgaggtgcagttcgagagcggcggcagcctcaaggccaagaccctgatcctcgccaccggcgctcgctggcgcgaaatgggcgtgcccggcgagcaggaatacaaggccaagggcgtgtgcttctgcccgcactgcgacggcccgctgttcaagggcaagcgcgtggcggtgatcggcggcggcaactctggcgtcgaggcggccatcgacctggccggcatcgtcgcccatgtgaccctgctggaattcgacagcaagttgcgcgccgatgccgtgctgcaacgcaagctctacagcctgccgaacgtcgaggtgatcaccagtgccctgaccagcgaagtgaagggcgacggccagaaggtcaccggcctggtgtacaaggaccgcaactccgaggagttcaagtcgatcgagctggaaggcatcttcgtgcagatcggcctgctgcccaacaccgagtggctcaagggcagcgtcgagctgtcgccgcgtggcgagatcatcgtcgacgcccgtggcgagacctcgctgcccggcatcttcgccgccggcgacgtgaccacggtgccgtacaagcagatcgtgatcgccgtgggcgagggcgccaaggcttcgctgagcgccttcgaccacctgatccggacctccgcgccggagtgacccggccagcgaccgtcgaaccagggacgcccggagcgcgaaagcgccccgggcgttttcgttggcgcgaccgcccgcctcaggccgggatatccaggttcgcgtggcccggcgcggcggccgcctcggcgtagaccttctcgtcgtcctcgatcacccgcgaggccggccccaccagcaacgggtcgggctcatgggcgatgcgccggtccttgtccgggtagtccagcgagtgcaggaagtggcggatgcagttgagtcgcgcgcgcttcttgtcgtcggacttgatgaccgtccacggcgcgtcggcggtgtcggtatggaagaacatcgcctgcttggcggcggtgtagtcgtcccacttgtccagagacttgatgtcgatgggcgacagcttccagtgcttgagcggatcgtcgcggcgcgagatgaagcgccgcagttgttcctcgcggctcaccgagaaccagtacttgaacagcaggatgccgctgttggtgagcatgcgctccagctccggcgcctggcgcatgaactccaggtattgcagcggcgaacagaagcccatgacccgctcgacgccggcgcggttgtaccaggagcggtcgaagaagaccatctcgccggcggtgggcagatgttggatgtagcgctggaaataccactggccctgctcctgggaggacggtttctccaaggctacgatccgcgcgccgcgcgggttcaggtgttccatgaagcgcttgatggtgccgcccttgccggcggcgtcgcggccttcgaacaggaccaccacgcgctggccggtctccttcacccagctctgcaccttgagcagttcgatctgcaggtcgtgcttggccttctcgtactcgttgcggcgcatccgcgtgtgatagggatagttcgccggcaggctcgccgaggtgctgtcctcgctgctgccgtggggcgcactggcgacctgcagggccaccggcttctggctgattgcctggatctcctcgcgggccttctgcgccgggctggccactcgcgggcggcgggtcgccggcttgcgcggggcgcggcgggcggctggccgggccggcttggccggctgcgcggcgggttgctcgggggaggggggactgacagtgggttcttcgctcatgcgggactccttccgttctacgttttcagctatgcagtcccccactctatgcccctgccgggaggcgtccgttgacccccatcaaaccgcgcccggccgccaccgggaggaaagccttacacctctccagaaatcccttgtaggatatcgccacgcgcgtggcgccccgtcgtcgccccgcggacctggatcagcagacagggtgaacactgagctggctctcatcaaccgagggccggcagcgttcgcgccggcccgccgatccgacgaaggtccgcacatgtcccgcacctggattcgcaatcccctcgccatcttcaccgccaacggtctcgacgccgccggcggcctggtcgtcgaagacggccgcatcgtcgagctgctcggcgccggccaacagcccgcgcagccctgcgccagccagttcgacgccagccggcacgtggtgttgccggggctggtcaacacccatcaccacttctaccagaccctcacccgcgcctgggcgccggtggtcaaccagccgctgttcccctggctgaagaccctctacccggtctgggcgcggctgaccccggagaaactcgaactggccaccaaggtggcgctggccgagctgctgttgtccggctgtaccactgccgccgaccaccactacctgtttcccggcggcctcgaacaggccatcgacgtgcaggccggggtggtcgaggaactgggcatgcgcgccatgctcacccgcggctcgatgagcctcggcgagaaggacggcggcttgccgccgcagcagacggtgcaggaggccgagaccatcctcgccgacagcgagcgactgatcgcccgctaccaccagcgcggagacggtgcccaggtgcagatcgccctggcgccctgctcgccgttctcggtgactccggagatcatgcgcgccagcgccgaactggcggcgcgccacgacgtacgcctgcacacccacctggcggagaccctcgacgaggaagacttctgcctgcagcgcttcggcctgcgtaccgtggactacctggatagcgtcggctggctcggcccgcgcacctggctggcccacggcatccacttcaacgccgaggagatccgccggctcggcgaggcgggcaccggtatctgccattgcccgagttcgaacatgcgcctggcctcgggcatctgcccgaccgtggagctggaggcggccggcgcgccgatcggcctgggagtcgatggctcggcctccaacgacgcctcgaacatgatcctcgaggcgcgccaggccctgtacctgcaacgcctgcgctacggcgccgagcggatcaccccggaactcgccctgggctgggccacccgtggctcggcacgcctgctcgggcgcagcgacatcggcgagctggcccccggcaagcaggccgacctggccttgttcaagctcgacgagctgcgcttctcgggtagccacgacccgctctcggcgctgctgctgtgcgctgccgaccgcgccgaccgggtaatggtcggcggcgcctggcgagtggtcgacggtgccgtggagggcctcgacctggccgccctgatcgcccgccaccgcgctgcggcgagtgccctgatcgccggttgatgcgggttccggtaggggaagcgccgtgcttcctctgtcggttcgcataggtcggcgcgtggcccgcaactggctagactgtggcattccccaccaggagccgccccatgtcacgcgccgcccgcccatgcaatcgcttttgcagccttctgctaggactcgccctgctgatgcccgccagccttcctctgtccgctgccgaaacggtggcgccgccatcgccgcggacgctgatcatcgacaccgacccgggcgccgacgatgtgatcgccctgctgttcgccatggcctcgccgaaggagctgaagatccaggcgctgaccaccgtcgccggcaacgtgccgctggaaaagaccgcgcgtaacgcccggctggcccgcgagtggggcaagcgcccggatatcccggtctacgccggcgccccgcgaccgctgctgcgcacgccgatctacgccgccgacgtgcacggcagcgaaggcatcagcggcgtcgaggtgcatgagccgaagcagccgctggccgaaggtaacgccgtggactacctgatccgcaccttgcgtgcggcgccggagaagagcgtgaccctggccatgctcggcccggagaccaacctcgcgctggccctgacccaggccccggacatcgtcaagggcatccgcgagatcgtgatcatgggcggcgcccacttcaacggcggcaacatcaccccggccgccgaattcaatatcttcgccgacccccacgcggcggaaatcgtgctcaagagcggggcgccgatcaccatgctgccgctcgacgtgacccacaagatcctcaccagccccgagcgcatcgccaagctgcgcaacctcggcaaccaggccggcaagaccgtcgccgacatcctcgacgcctacgtccagtacgacatcaagtactacggcctgaagggcggcccggtgcacgacgccacggtggtcgcctacctgctcaagccctcgctgttcaagggcaagcggatcaacgtgcaggtcgacagccgcgagggcatcaccttcggccagaccgtggccgactggtacggcggcctcaagcagccggccaacgtcgagtggatcaacgagggcgacgcccaggggttcttcgacctgctcaccgagcgtatcgcccgcctgccctgagtctctcgccgtacggccggcgccgggtcagccgtggcgccggctggcgagttggcgcagggcctgctcggcgtcgccgacgactagcgttgccggcaccgccagcatcaggttgagcggcaggccgaactcttccagggtcatgccgtcgcggtcgcgggtcggatcctcgccgatcagctccggggcgtgccggcggatccgctcggcgtagctgccggcgtcgtcgacgtagccatagaccggcttgccgagggcggtggcatagccgacctcgaaggcggtgccgctgtccggctcggcgccgcggaagaagttcaggttggccagcaccgcgtcggcgcgttcgatcaggccgatgttggcgcggtagatccaggccgcctgttcgcgcggctcggcgagctgtttcggcagcgcgttgtccagcgggtagaggccctcgaaaccgtagcgtgcgcacagtgccttgagtgcttcgccgtgggcgacggcgtcggcgcggaacacatcgggaccggccagatagagtttccgcggcctggccgcggcgcgtacgcccggcaggctgccgagcagggcgccggcgggcagcagcagggctgccaggcgcaggaaggtacgacggctgctggaacccttggatcggttcatcggatgcctcttgcaggccggcctcccggatggggccgttgttgtccaggattatggccggcaagcgacgggccgggcggcggctatctgccagcagctaggcgacggccttcccgcgatgtcaggcgcgctcgagttcctcggcgaggcgtcgcagggcctcgcgcgggccgccggcgaccagccgcgaaggcaccgccagcatcaggttcaatggcaggccgaaaccctccagttgccaaccgtcgcggtcctcgccggggtgctcgccgagccattccggggccagccgggcgaggcgctcggcgtaggcgccggcatcgctgaggtaggcatataccggcttgcccagggccagggcgtaacccacttcgaaggcggtgccgctgtccggctcgctgccgcggaacggttcgaggttggccagcacgcagtcggcgcgctcgatcaggccgacattggcgcggtagatccaggcggcctgtgcggctggctcgcggatgtcggcgggcagggcgtggtcgagcgggtagaggccgacgaagccgaactcggcgcagagcgccttgagggtttcgccatgggcttcggcgtcggggcggaagacgtccggcccggccaggtagatcgcggtcatcgcgtgcgtgccttgttacggaaagccagcgcccatggtagcgccatcgtggcggcgccggcatgcaccaagcgatggcgcgctgcaccgtcctgcagccgcgccggcatgacgcggcgcgcagaagcgcgagcttgagcggagttgtccgggtggtcaggtaattgcatcggcgggcgggctgaacgcgaagccacgcccgatggccaaccctgcactcaccggagcacgcccatccatgaaacaccgtcgcacgcaatcccgcatgtccgtcctgcgccgccttgccgccgtcctcggcctcggcgcctgcgctctcgccgccgaggccgccgaaccactgaagatcggcttcgtctatgtcggcccggtcggcgaccacggctggacctaccagcacgaactgggccgccgcgaactggtggagcacttcggcgacaaggtgaagaccagcttcgtcgagaacgtcgccgagggcgccgacgccgagcgggtcatccgcaacctggcgaaagacggctacggcctggtcttcaccacatccttcggctacatgaaccctaccgccaaggtggcccggcagtttcccaaggtgaccttcgagcacgccaccggctacaagcgcgacaggaacctcggcacctacctgtcgcgctcctacgagggacgctacgtcggcggcttcctcgcggcgaagatgacccgcagccacaagatcggctacatcgcctcgtttccgattcccgaggtgatccgcgacatcaacgcgatccagctggcgctggacaaatacgacccgcaggccgaactcaaggtgatgtgggtgagcacctggttcgatccgggcaaggaggccgacgcggccaacgcgctgatcgaccagggcgtcgacgtggtgttccagcacaccgatagcccggcgccgatccaggccgccgagcgtcgcggggtgtacgccgtgggctacgcctcggacatgcagcacttcggtccgaagaccgtgctcacctcgatcgtcaacgactggggcccgcactatatccgctcggcccaggcggtgatggacggcacctggaaatccgaggacttctggggtggcctggccgagagtacggtggtcctgccgctgaaccaggaggtgctgccggcgccggtgcgggaagaggcgggcaggctgatcgagtcgatccgcagcggagccttccaccccttcaccgggccgatccgcgaccagtccggcaaggagcgtttcgccgccggcgtcagcgcgaccaatgccgacctggcgtcgatgaactattacgtggaaggcatcaaggccgacctgccgaagtgagccctggccttgtatggaaaaagtcgccgagcgcaggcactttccgtacaggacccatcgaggagagcgcgattggaccgtctacccatcatcgacatcgccccgctctacggcgccgaccgtggcgcctggaacgacgtggcgcggcggatcgaccaggcctgccgcgagtggggcttcttctacatcgccggacacccgttgccggccgcgcgcttcgaagccctgctggcggcggcgcgggagttcttcgcgctgcccgtcgaagagaagctgaagatcgatatcacccgtagccgcaatcatcgcggctatggcgcgatcgccaccgagcagctcgacccggcgttgcccagcgacttcaaggagaccttcgacatggccctgcacctgccggcggagcatcccgacgtgcgcgccggcaaatccttctacgggcccaaccgacaccccgacctgcccggctgggaggccctgctggaaggacactatgccgacatgctggcgctggcccgtaccgtgctgcgcgccctggccatcgccctggggatcgaggaggacttcttcgatcgccgcttcgagcagccggtcagcgtgttccgcctgatccactatccgccggcctcggcccggcagagcgccgaccagcccggcgccggcgcgcacaccgactacggctgcgtgaccctgctctaccaggacgccgccggtggcctgcaagtgcagaaccgccagggcgaatggatcgacgcgccgcccatcgacggcaccttcgtggtcaacatcggcgacatgatggcgcgctggagcaacgaccgttaccgctcgaccccgcaccgggtgatcagcccgcgcggggtgcaccgctactccatgccgttcttcgccgaaccgcacatggacaccgagatccgctgcctgccgggctgcttcgacgcggacaacccgccgaagtatccgccgaccacctgtggcgattggctgacctcgcgcttcgcgcagacctatgcctatcggcgcggcgaaacggcctgagccgcccgtcgcgcgcgggagcggctcgtgggtttgccgcgggcctgactcccgggacaggttaaacttgccggccaagaccagcctgatcgagaacccaccccatgtacgaatggctcaacgccttgcccaaggccgaactgcacctgcacttggaaggtaccctggagccggagctgctgttcgccctcgccgagcgcaaccgcatcgccctgccctggaacgacgtcgagaccctgcgcaaggcctacgccttcaacaacctgcaggaattcctcgacctctactacgccggcgccgacgtgctgcgcaccgagcaggacttctacgacctgacctgggcctacctgcagaagtgcaaggcgcagaacgtcgtccacgtcgagccgttcttcgacccgcagacccacaccgatcgcggcattcccttcgaggtggtgctcgccggcatccgcgccgcgctacgggacggcgagaagctgctgggcatccgccatgggctgatcctcagcttcctccgccacctcagcgaggaacaggcgcagaaaaccctcgaccaggcgctgccgttccgcgacgccttcatcgccgtcggcctcgacagctcggaagtagggcatccgccgagcaagttccagcgggtcttcgaccgggcccgcagcgaaggcttcctcaccgtcgcccatgccggcgaggaggggccgcccgagtacatatgggaagccctcgacctgctcaaggtcgagcgcatcgaccacggcgtacgcgccttcgaggacgagcggctgatgcggcggctgatcgacgaacagatcccgctgaccgtctgcccgctgtccaacaccaagctctgcgtgttcgacgacatgagccagcacaccatcctcgacatgctcgaacgcggcgtgaaggtgacggtgaactccgatgacccggcctacttcggcggctatgtcaccgagaacttccatgccttgcagcagagcctgggaatgaccgaggagcaggccaggcgcctggcgcagaacagcctggatgcgcgcctggtgaagtgaggggcggcgcgccgggcaacccggcgcgcgacccgcaaggcgtttcgtcgtcgccggcttctcggtattgatgataagcattatcatttgtgggctgctcagcattcccatggcgccgccccggcgccggctttcgtgcagccgtccctcaccgatgcccgaccgcgaccttccctccggcccgcgcccggatgccttgccggcagacggcgaggcggcgcgccgcgcggatctgctcaaggccttcctggcccagcgccagcgcatggaaagcctggtcagccgctgggtaggctgccgggcgaccgccgccgacctggtccaggaactgttcctgcgcttctggcggcgcccggccgccccggtggaggagcttggcagctacctcctgcgcagcgcgcgcaacctggccatcgaccacttgcgtggcgaaggatcgcggcagcggcaactggacgactggctgccggagcagcgccagggcgagccggtcggtcccgagcaggcgctcgaggccggcgaccagtggcgccgggtcgaggccgccttgcgcggcctgcccgagcggacccggcggattttcctgctcaatcgcatccacggccgcacctacgcggagatcgcccaggccatgcagctttcccaaagcgccgtggaaaaacatatgatgcgcgccctcgacgcctgcaaggcgagcctggccggcccggccggcgagcaggcaaggagcgcccagccatgacccgaaccgatagcgacgccgcgccctacgatcccgtcctcgagcagaccgcccaggcctggctggtgcgcctgcgcggtacgccggatgcggcgacccggcgggccttcgaggactggctggcgcagcggccggcgcatgccgaggcctatgcccgcgccgaggcgctctggcgcctgacggaaataccggcgagccgcctggccatcgaagaggccgatgccctggaagcctacctgcggccgcgccgagcgtcgcgcaacccgcggcgctgggcctacccgctggccagcgtcgcctgcctgctggcgatgctctggctgggcggctggtggcagcccggcgactggctgcaggactggcgtgccgactatgtcgccgcgccgggacaggtcgccgaatggaagctggccgatggctcctacctgagcctggacgccggcagcgcggtgcgcgtgcgtatcgacggcggccagcggcgggtcgaactgctgcgcggcgccgccgcgttgcgggtgaagcgcgacgcgctgccattcgtggtcgaggccggcgaaggtcgggcgcgggtactgggcaccgagttcgaggtccgtcgcggcgccggggcgacccgcgtcaccgtgttgcaagggcgggtcgcggtgagcgccggcaccggtgcgggcgccgccgaggaagtgctgggcgccggccagcaggtcggcttcgccgacggcaagctgggccggcccgtggccatcgacgccgccgccgcgctggcctggcgccagggttggctgagcttctaccggcggccgctggcggaagtgctcgacgaactcgctcgctactaccccggacgcattctcctgctcgacgacgcgctcggccgccagccggtcagcggcagcttccgcagcgacgatcccgaagccgcgctgaagtcgctgcaggcggtgctcggctatcgccagcagatcctgttcggacgcctggtggtgattcgctgacggcggccccgctccgtttggccgcaggaatctttcccggcgaagaatttttttgcgctggggggtgaggtaaatccggcgccgcttcgtgtagtgctcatgaccgcgattgattcgcattagaaaagcgaccgacacgagcaacccatgacccccttcccgcgcttcgccctgcgtactctccccgccctgttcctcagcctcggctgtctcgccgccaccgcgcaggccgccgaggcggttcgctaccgcttcagccaggctgccgcgccgctggcccaggcgctcaacgcgttcagccgggccagcgggcagacgctgctctacaccgccgagctgccgccgcaggcgaccgctccggcattgcacggttcgctggacgcggaggaggcgctgcaacgcctgctgcagggcagcggcctgcgcgcgcggcggatcgacgagcgcaccctgaccctggaaccgatccccgccagcggcgcgctcgacctcgatgccacgacggtctccgccgccgccccggcgcagggctaccggccggcggccaacgcctcgatcagccgcggcgatgcgccgctactggaaatcccccaggcgatcagcgtggtcccggcacaggcgctgcaggaccagcgcccgcgcaaccttgacgacgcgctgggcaacatcagcggcatcacccaggccaacaccctcggcggtacccaggacgcggtgatgaagcgcggcttcggcgacaaccgcgacggctcgatcatgcgcgacggcatgccctcggtgcagggccgcaatttcaccgccaccgccgaccacgtcgaggtgctgaaggggcctgcatccctgctctatggcatccaggacccgggcggggtggtcaacgtggtgagcaagaagccgcaactgcaacaagccaacgccctgaccctgcgtggctcggcctacgcccacgggcgcaacggcagcggcggccagctcgactccaccggcccgctgggcgacagcggactggcctaccggatgatcctcgatcatgaggacgaggattactggcgcgacttcggcaagagtcgcgagacgctggtggcgccctcgctggcctggtacggcgaggacacgacggtcaacctgagctacgagcaccgcgagttcaccacgccgttcgaccgtggcacggccatcgacccgcgtaccaaccgcccgctggacatcccgcgcagccggcgcctggacgagcccttcaacatcaccgagggccgttccgagctgacccgcctggatctcgaacggcagctcgacgacacctggaaggcccacttcggctacggctacagtcgcgagacctacgacgacaaccaggcccgggtgatggccgtgaatgccgacggcaccctgacccggcgcatggacggcacccacggcgcggtcagcagcgacagcttcgccaccctcgacctgagcggaacgctgcaactggccgggatgcaacatgacctgcaattcggcatggaccacgagaagcgcaagatcttccgcgccgacctgctgcgcgacagcaagaccagccgcttcgactacctcgacccggtctatggccaggtggtgccgtcgacccgggtggtcgccggcgacagcgaccagaccgacaagctgcgcagcgactcgctgtacttccaggactcgatccacctggacgaacgctggatcctggtcggcggcgcgcgctaccagatctacgaccagctcgccgggcgcggccggccgttcaacgccaacaccgatatcaacgggcagaaatgggtgccgcgcggcggcctggtctaccgcctgagcgacgaggtttcgctgtacggcagctacacgcgctcgttcaagccgaactcgaccatcgccccgctgagcaccggcgagaccatcgattcggcgatcctgccggaggaggcgacctcctgggagctgggcgccaagctggatgtgccggggcgtctcagcggcaccctggcgctgttcgacattcgcaagaagaacgtgctggtcaacgaactcgacggtgccggcaacagcagcgtgcgcgccgccggccgggtccgctcgcgcggcctggagctggacctcaccggccagctcagcgaacgctggagcctgatcggcagctacgcctggctcgccgcggaagtcaccgaggacccgaccctggagggcaagcgcctgcagaacgtggcgcgcaacaccgcgtcgctgtcggcggtctacgaactcggccagctcttcggcggcgaccgcctgcgcctgggcggcggcgcgcgctacgtcggcaagcgcccgggcgacccggccaattccttcgacctgccgtcctacaccgtggccgatgccttcgccagctacgacacccgcttcggcgggcacggcgtgaagttccagctcaacgtgaagaacctgttcgaccgcacctactacccgtccagtgccaatcgactgtacgtggcgatgggcgagccccggcagttccaggtgtcgacgacggtggagttctgagtcggcgctcgctccaggtggggttccccggcgtcctcctggacgtggaggcccccctgaagggcgaagggtcggcgcgatgctgcccgaccatgctccatctggttccttcttccccagggaagggattgcccggcgcgtgagtcgttccgccatccagtgccttctccctttggggaaaggaaggcggagaaccgcctggcacgacctcgccgcacgccacacctcgttcccaacccgcccgttgggtaccatgcccgcaccactcgccgccacggccgccccatgaacctcgacaaccgcatcaagttccgccacctcgcctgcttcctcgaagtcgcccgccagcgcagcttcgccaaggcggcggatgccgtggcggtgtcgcagccggcgatctccaagaccctcaaggaactggaggaaatcctcggcgcgcgcctgttcgaacggagcaaggccggcgccgagctgaccgaggcgggcgtgaccttcctgcgctatgccggcccctgcgtgcaggccctgcgcgacggggtgaacaccctgcgcggccacgaggcgcaggtcgagacggtgcgggtcggcgtgctgtcgacggtggagagcctggtggtgcccgaggtgatccggcgcctgcaccggcgccacggtgcgctggtggtcagcgtcgccaccggacccagcgcctacctgctggcgcaactgaaggtcggcgagctggacctggtggtcgggcggatgaccgatagcccggacatccagggcctgaccttcgagcacctgtacagcgagtcgatgatgctggtggtgcgtcccggccaccccttgctcgccgcgcccctcggcgacccgcagcggctggccgaattcccgctggtgctgccgctggccggcaccaccatccgccgccacgccgacagcctgttcgtgcaatggggcatcccgctcgccggacagcgcctggaaaccctctcgccgaccctcagccgcagctatgtgttgcgcagcgaggcgatctgggtggcgccgcgcgatgccgtgcgcctggacgtcggcaacggcgagctggccgagctggacctgggtatccgcgaaccgggcggttcggtcgggctgtgccacaacgcggccttgccgttgccgctgggggcgcaatggttcagcgcggtgttgcgcgaggtggccgccgagttgcactgataaagcataaccaaatggttatgtatggggccggataattcactgtccccgtcccgcctcctgcgcaagacttcgttttccatgcctgaatccacaagcctggcgaccgataacgcgaataacaggagcccgacatgcacgacgccgaaagccgtcgtttcgtcatccgtgaccgaaactggcaccccaaagccttgacccccgactacaagacctccgtgccgcgctcgccgagccaggcgctggtgagcatcccgcaatcgctctcggaaaccagcgggccggacttctcccacctcaggctcggccgccacgacaacgacctgctgctcaacttcgaccacggcggcctgccccagggcgagcgcatcatcatgttcggccgggtcttcgaccagtacggcaagccggtcccgcacaccctggtggagatgtggcaggccaacgccggcgggcgctaccggcacaagaacgaccgctacctggcgccgctcgacccgaacttcggcggcgtcggccggaccctcaccgacagcgagggccactattacttccgcaccatcaagcccgggccctatccctggcgcaacggccccaacgactggcgcccggcgcacatccacgtgtctgtcagcggcccggcgatcgccgcgcggctggtcacccagatgtacttcgagggcgacccgctgatccccaagtgcccgatcatccgcacccttgccgacccggaggcggcgcagagcctgatcggccggctcgacatgagcatggccaacccgatggactgcctggcctaccgcttcgacatcgtcctgcgcgggcagcgcaagaccttcttcgagaacgcctgaggagccgaccatgagccacgaactgctgcgggaaaccccttcccagaccgccggtccctatgtccacatcggcctggcgctggccgccgccggcaacccgacccgtgacctggagatctggaaccgcatggcccgcgaagacgcgccgggccagcacatcctcctgctcggccacgtctacgacggcaacggccacctggtgcgcgactcgttcctggagttctggcaggccgacagcgaaggccgctaccaggagcgctacgatccggagcgaccgttcaacagcttcggccgcaccgccaccaccttcgatgccggcgagtggaccctgcacacggtcaagccgggggtggtgcgtaacgcccagggcgtgccgatggcgccgcacatcaacgtctcgctgttcgcccgcggcatcaacatccacttgcagacccggctgtacttcgatgacgagaccgaggccaacgccgcctgtccggtgctcaacctgatcgagcaggcgccgcgtcgcgacaccctgctcgcgcggcgctgcgaagtggacggacagctcgcctaccgtttcgacatccgcatccagggcgacaacgagacggtgttctttgacttctaggcgcatcgatcgcgcgggaaggaagggcgcccttgccggagcggcaagggcgtacccagaacccgccgatgggtacctgacattactcccggagggcgatgggtagccccgacagtactacagtcggaggcgctccggtcaattgcgatgatcgaacgagtgtccgataatcggcgagcctttccgtgacccgaacccgaacgtccatgagcgaactcccggaacaccccgccaccctggcgccgccgaccgtcctttcgccggccaagcgcatcgaggccttcaccggcgatcccaacttcatgacctcgctggcccgtggcctggcggtgatccatgcgttccaggagcgcaagcggcacctgaccatcgcccagatcagccaccgcaccgagataccccgcgccgccgtgcgtcgctgcctgcacacgctgatgcagcttggctacgccaccaccgacgggcgcacctactcgctgttgccgaaggtgctcaccctcggccacgcctacctgtcgtcgacgccgctggcgatcactgcgcagccgatcctcgaccgcctcagcgaacagctccacgaagcctgttcgatggccaccctggagggcgacgacgtgctctacatcgcccgttcggccactccccagcggctgatttcggtggacctcaacgtcggcagccggctgcccgcctattgcacctcgatgggccgcatcctcctcgccgcgctggacgacgacgcgctgcacgcctacttcggcggagtggagatgcaggccaagaccagccgtaccctgtatacccccgagaccctgctgccgtgcctggtggagattcgtcgccagggctggtgcatcgtcgaccaggagctggaagtcggcctgcgctcgctggcggtgccggtacgcgactccgccggccatgtgctcgccgcgctgaacgtcggcacccatgccgggcgggtctcccgcgccgaactggaaagccgtttcctgccgttgctgctggaggccagccgcgagctgagcgcgcgcctgttcacctgacgccggaggcgatcccctccacaagtttggaaaaggaacccccgcttccatctgatagtcgcaatccttggggacgcggctagaatccctgccaattctgggagtttccggccggatcggccggtatctgtatggatcgcgaaggggaaggcatgtcagacgccagaggcgcttttcattccaaaggtcgctggtcgcggatggcgctgcccgccatcctgtgcgccggcctgcttgtcggttgcggcgccgagccgcccgccgaggaacacgtccgtgtgctggcgcagacggtgaagatggccgagttcgcctcggccacctcgatcaccggcgacatccaggcacgggtacaggccgaccagtcgttccgtgtcggcggcaagatcgtcgagcgcctggtcgatgtcggcgaccacgtcgcggctggccaggtgctggcgcggctcgacccgcaggaccagcgcagcaacgtggagaacgcccaggcggcggtcgccgcgcagcaggcgcagtcgaagctcgccgacctcaactaccagcggcagaaggcgctgctgcccaagggctacaccagccagagcgagtacgaccaggcgctggcctcggtgcgcagcgcgcagagttcgctgaaggccgcccaggcgcagttggccaacgcccgcgacctgctttcctataccgagttgcgtgcctccgacgccggggtcatcaccgcccgccaggccgaggtcggccaggtggtgcaggccaccgtgccgatcttcaccctggcccgcgacggcgagcgcgacgcggtgttcaacgtctacgagtcgttgttcagccacgatgtcgacggccagcggatcaccgtcagcctgctcggcaagccggaagtcaccgccagcggcaaggtccgcgagatcaccccgacggtggacgagcgcagcggtacgctgaaggtcaaggtcggcctcgactcggtgccggcggaaatgagcctcggcagcgtggtcaacgccagcgtcgccgcgccggccgagcacagcgtggtgctgccctggtcggcgctgtccaaggtcggcgagcagccggcggtctggttgctcgaccagcaaggcaaggcgcgtctgcaaccggtgcgggtggcacgctacgccagcgagaaggtggtcatcgacggtggcctggaggcgggccagacggtggtcacggtgggcggtcaactgctccatccgggccaggtggtcgaggtggcccagccgccgcagccgacccagagcaccgccagccgcgacgccgtgggcggaggccagccatgaagccgttttccctcgccggcctgttcggcttcgccctgctcctctccggctgcggcgacgagccgccgccggcaccgccgcggccggtgctgacggtgaccgtgaagaccctgaagaacgacgacctcggtcgcttcgccgggagcatccaggcgcgctacgagagcgtgctcggcttccgcaccaacggacggatcgcctcgcgcctgttcgacgtcggtgacttcgtcggcaagggcgcgctgctggcgaccctcgaccccaccgaccagcagaaccagttgcgcgccagccagggcgacctggccagcgccgaggcacagttgatcgacgcccaggccaatgcccggcgccaggaagaactgttcgcccgcagcgtcaccgcccaggcgcgcctggacgatgcgcggacccgcctgaagaccagccaggccagcttcgaccaggccaaagcggcggtgcagcaggccagggaccagctttcctacacgcgcctggtgaccgatttcgacggcgtcatcaccacctggcacgccgaggccgggcaagtggtcagcgccggccaggcggtggtcaccctggcccggcccgaagtgcgcgaggcagtcttcgacctgcccaccgaagtcgccgagagcctgccggccgacgcgcgcttcctggtcagcgcccagctcgacccgcaggccaggaccaccggcagcatccgcgagctgggtccgcaggccgacgcctcgacccgcacccgtcgcgtgcgcctgagcctggcgcagacgccggaggcgtttcgcctcggttcgaccatccaggtccagctgagcagcgccggtagcgtgcgcagcgtgctgccggccagcgtgctgctggagcgcgacggcaagacccaggtctgggtcgtcgatgggaaacagtccagcgtggccctgcgcgaggtacaggtgctcagccgcgacgaacgccaggtggtgatcggacagggcctggccgacggcgaccgggtggtccgcgccggagtcaacagcctcaagcccggccagaagatcaaactcgacgaggatgcgcgatgaagggcggtttcaacctgtcggactgggccctgcgccaccagtccctggtctggtacctgatggcggtatcgctggtgatgggcgtgttctcctacctcaacctggggcgcgaggaggatccctcgttcgccatcaagaccatggtcatccagacccgctggccgggcgccacggtggacgacaccctggagcaggtcaccgaccgcatcgagaagaagctcgaggagctggactcgctggattacgtgaagagctacacgcgacccggcgaatcgacggtcttcgtctacctcaaggacaccaccaaggccggcgacatcccggatatctggtaccaggtgcgcaagaagatatccgacatccagggcgaattcccccaaggcatccagggaccgggtttcaacgacgagttcggcgacgtgttcggcagcgtctacgccttcaccgccgatggcctggacttccgccagctgcgcgactacgtggagaaggtgcgcctggacatccgctcggtgaaagacctgggcaaggtgcagatgatcggtgcgcagaacgaggtcatctacctcaacttctctacccgcaagctggccgccctcggtctcgaccagcgccaggtcgtgcagagcctgcaggcgcagaacgcggtgaccccgtccggcgtggtcgaggccggccccgagcgcatctcggtgcgcacctccggcaacttccgttcggaaaaggacctgcaggcggtcaacctgcgggtcaacgatcgtttctaccggctgtccgacctggccagcatcagccgcgatttcgtcgacccgccgacctcgctgttccgctacaagggcgagccggccatcggcctggcggtggcgatgaaggagggcggcaatatcctcgagttcggcgaggcgctcaatgcgcgcatgcaggagatcaccggcgaactgccggttggtgtcggcgtgcaccaggtgtcgaaccaggcccaggtggtgaagaaggcggtcggcggtttcacccgggcgctgttcgaggcggtggtgatcgtcctcatcgtcagcttcgtcagcctcggcctgcgcgccgggctggtggtggcctgctcgatcccgctggtgctggcgatggtcttcgtgttcatggaatacaccgacatcaccatgcagcgggtttccctcggcgcgctgatcatcgccctcggcctgctggtggacgatgccatgatcaccgtggagatgatgatcacgcgcctcgaactgggcgactcgctacacgactcggcgacctacgcctacacctcgacggccttcccgatgctcaccgggaccctggtgacggtggccggcttcgtacccatcgggctcaacgccagctccgctggcgagtacaccttcaccctgttcgcagtgatcgccgtggcgctgctgctgtcgtggatcgtcgcggtgctgttcgccccggtgatcgccgtgcacatcctgccgaagactctcaagcacaagtcggagcagaagaagggccgcatcgccgagcgtttcgacagcctgctgcacctggcgatgcgccggcgctggacgaccatcttcctcaccgcgctgctgttcggcgtgtcgctgttcctgatgaagttcgtccagcaccagttcttcccgtcttccgaccgtccggaactgctggtcgacctcaacctgccgcaaaacagcagcatccacgagaccagggcggtgatggaccgcctggaagcgacgctgaaggacgacgaggacatcgaccactggagcgcctacgtcggcgaaggcgcgatccgcttctacctgccgctggaccagcagttgcagaacaacttctatggccagctggtgatcgtcaccaaggacctggaggcccgcgagcgcgtcgccgcacgcctgcgcgatcgcttgcgcaaggactacgtcggcatcagcacctacgtgcagccgctggagatggggccgccggtgggacggccgatccagtaccgggtcagcggaccgcagatcgacaaggtccgcgagtacgccatgggcctggccggcgtgctcgacggcaacccgaacattggcgatatcgtctacgactggaacgagcccgggaagatgctcaagatcgacatcgcccaggacaaggcgcgccagctcgggctttcctccgaggacgtggcgcagatcatgaacagcgtggtgaccggcagcgcggtgacccaggtgcgcgacgacatctacctggtgaacgtcatcggccgcgccgaggatagcgagcgcggctcgctggagaccctggagagcctgcagatcgtcacgcccagcggcacctcgatcccgctcaaggcgttcgccaaggtcagctacgagctggagcagccgctggtgtggcgccgcgaccgcaagccgacgatcacggtgaaggcgtcgctgcgcggcgagatccagcccaccgacctggtcgcccggctggcgccggaggtcaagcgcttcgccgacggcctgccggcgaactaccggatcgaagtgggcggcacggtggaggagagcggcaaggccgagggcccgatcgccaaggtggtgccgctgatgctgttcctcatggcgaccttcctgatgatccagttgcagagcgtgcagaagctgttcctggtggccagcgtcgcgccgctggggctgatcggggtggtcgcggcgttgctgccgaccggcacgccgatgggcttcgtggcgatcctcgggattctcgcgctgatcggcatcatcatccgcaactcggtgatcctggtgacccagatcgatgccttcgagaaagacggcaagacgccctgggaagccgtgctggaagccacccaccaccgcacccggccgatcctgctgacggcggcggcggccagcctggggatgatccccatcgcccgcgaagtgttctgggggccgatggcctatgcgatgatcggcggcatcgtcgccgccacgctgctcacgctgatcttcctgccggcgctgtacgtcgcctggtaccggattccggaaccgggacgctgagcgcggcgtaaggggaagggggcgccgccgtagcagagtctgtgcggggggaaggagagcggacggcgggtgggccatccgccccgacgccgggcagggtatgcctggcgttgctacggcgacggcggccagtataggcagcccggcgccagggaaaatccgaccaatttacgaatctgttttgcaaccgaggtaatagtggacacattgcaaggcatgcgcgtgttcgccagggtggtggacagcggcagcttcacttccgccgcccaggccctggacctgtccaccgcgcaggtatcgcggctgatctccgacctggaggcgcacctgcagacgcgcctgctgcaccgcaccacccggcgcctggccctgaccgaggccggcgagcgctacctggagcggtgccgcgggatcctcgaggacatcgaggtcgccgaggccgaagccgccggcgcgcacatccgcccctgcggccgcttgcgcgtgcagtcgctgatgggcatgggccagcatcacctggtgccgatgatcgcccgctacggcgcactgttccccgacgtggtgatcgagctgaccctgtcccagcgcaacccggacatgctcgaggaaggccaggacgtgctgatcaccggcgagcgccagttgcccgactcggagttcgtcgcccagcgcctgggcagcatccacagcgtgctctgcgccagtcccggctacctgcagcagcgcggcgtgccacgctcggtggacgacctggagcgccacgtctgcctgcgcctgcaggacccggcctacccggagggctggatcttcgccgacgagcagggcgagcgcaccgtcagctcgcagaacaccttcatggtcaatgtcgccgaggtcatggcccaggcggccaaggccgacctcggcatcgccctgctgcccagctacgtggcggccgcggcgctgcgcaacggcgagctgctacgggtgttgcccggccatgccatgcaccagcggaccatctatgcgctgtatccctcgcggcgttacctggacgcgaagatccgcacctgggtcgatctgttgcaacaggaacttccccaggcattcgcccgcgacgaaactaccatgcaaagttcaagttactgggcacagtgaaggattgttgttattgaggtaatactctctcgtctgtttggctatttttccgagcatggcggttaactaatatggcgcctgtcccaagtgaacagggtgtcatcggagacccgccatgaatcgccagatccttgctgccgccatactcagtttgttttccctcgcattttcccaggccggtttcgccgaagagtcctcgctgatgaccaaccgcatggtcgacgccaaccagcaggccatcgagcaccagcaggaactttccgcctccgccgcgcaggccggggcacgcagcgactcctgatctagcgcatggcgccagccgcgccatggcttcccccgggtactcgggaagcgtgagcctgggtaccctgtccttgcgccgcatatgatatgcggcgttttttttgccttcctgaccgttcggacaattcttgcagaatatgtaaaagactttcgttggatatcgggtttttccgatagtggcaaaaaaatataatcgcgccagctcaatggataattgtcgctggctgtcgacgatattcgttctgtcttcatcgatctcgccatgcaagagcgggacgtggaaagcctaaagcccgatgagtcgaagagactttcaatagaagagtccgactgcgttccagccggtttccagtgtccggaaatacactggcaagacttcccgacgccgaactttgattgctcctattcgacgtcttctcaaggccgctgataccagcggccttttttttcgggttgcgcccggctgggcgccccatgggagcgatcgcccgcgcgaggccagcagaagcgtcgccgggaacgacaccacaacacgctttccggccttgccggatttcaccacgctgtaagaaggagcaaccgcaatgaggaatctgttcgccttgacgccgatggcgctggcgctgtgcaccgcgtccgccgcctgggccgatgagggggaagccaaagaaggcttcatcgaaggctccagcctccaattgctgacccgcaactactacttcaaccatgaccgccggcacgcttccgggcacgacagcaaggaatgggcgcaaggcttcatcgccacctttcagtccggctacacgcccggcgtggtcggcttcggcgtcgacgcctacggcatgctcgggctgaagctcgacggcggcggcggtaccggcggcaccagcatcctgccgatcaccgcgccgagcaaggaaggctacgaatccggcaaggcgcccgatgagttctccagtggcggggcggcgctgaagatccgcgccttcgacaccgagctgaagctgggcgaccagttcctcagcaacccggtggtcgccggcggcgagtcgcgcatgctgccgcagaccttccgcggtgtgagcctgaccaacaacagtttcgaggacctgaccctcacggctggccaggtcagtttcaccaagtactacaaccagagtggccaccgtcgcctcggctcgtactacggcgaactgccgggcgaccgcgacagccatcatctcagctggctgggcggcacctggggcggcatcgagggcttcaccagcagcctgtacgccgccgaactgcagaacgtctggaagcagtactacgccgacgtcgactacacctacgagatcgacgacaactggtcgctgaaccccggcgcgcactactacaagaccgtcgacagcggcgactcgttgctcggccggatcgacaacaacacctacagcctgcatttcgcggtcggctacaggcagcacaccgtcaccgcggtgctgcagaaggtcaacggcaacacgccgttcgactacatcaaccagggcgacagcatcttcctcgacaactcgcagcagtattccgacttcaacggtcccaacgagaagtcctggaagctgcaatacgactacgacttcgtcgccctcggcctacccggcctgagcgcctcggcctcgtactcgcgcggcaagctggacctgacccgggtcgatccggacagccccggctacggcggctggtacagcgccgacggcaagaacgccaagcactgggaacgcgacctcgacctgcagtacgtggtccagggcggtccggccaaggacctctcgctacgcctgcgctgggccacccaccgcggcaccggcggctacagcgcggtggacaacgacatcgacgaataccgggtgatcgtcgactatcccatcgacgtgttctgagccccgcgcgctgggcccttcgccgggctcagcgctggcggaacagttcgccgggagtgaagccgaagagtcccttgaaggcggcgatgtaggccgaggtcgagtcgtagccgctgtccagggcggcgccggtgacgctgtcgccggcttccagcgcgttgagcgaggcgagcaggcgctggcgttggcgccagagccggtagttcatcccggtctcgcgctggaacaggcgcgacagggtcttttccgaggtgcccaggcgctgcgcccagtcgcccatggtcaggctctgggtcggttcgtcgatcagtgcctggcacagccgcagcaggcgcggctcgcgcggcatcggcagggagaaggcgacctccggcagcagccgcaactggtccagcagcacctgcaccagccgcgattcggcgctgtcgccctccgggtagtccaccggcaactcgcagaaactcttgatcagctcgcgcgccagcggcgtcacctccagcacccggcaacgcgtcggcgcccaggcgcaggcgtcgccacggatgtacaggctgcgcatctcggcgcgggtggaggtgaccacctcgtgttccagttgcgccggaatccagatcgcccgctgcggcggggcgaagaagctgccctcggcggtatgtacgccgagcacgccgctgatggcgtaggaaagctgtacccaggcgtgccggtggcgcgaggtccaagagccggcgcgcaggctttcggcgcgcgcgtagaccggccgtggcaggcgggcgagggtgggaatcgggcggtgcagttccgcaggctgtccgttcatcgtcatgacttggcgtcgtgtcgctagtcggcagagtctggcagggctaacctgccgcctcaagtttcccggagcccacgccgatgctcgacttctccgcccacgcgcttccctacgcctcgcaacgttcgccggtccatgcccgccgcggcatggtcgccacctcgcagccgcaggcggcgcaggtcgggctggagatattgcgccgtggcggcaatgccatcgacgcggcgatcgccaccgccgccgcgctgacggtggtcgagccgaccggctgcgggattggcggcgatgccttcgccctggtctggacccgcggacgcctgcacggcctggacgccagcgggcgcgcgccgggcctgctcgatcgcgagcgggtgcgcgccgccggccacgagcggatgccgctgtacggctggacgccggtcaccgtgccgggctgtccggcggcctggggcgaactgtcgcggcgcttcggcaaattgccgttcgaacaactgctgcggccggcgatcgagctggctcgcgatggctttccggtctcgccggtgatcgcccgcctgtggcagagcggcctggacaagttccgcgcggcgttgccgcagcggcccgagctgcgggcctggttcgacgagttcctcatcgacggccgggcgccgcgcgccggcgaggtgttccgccagccgggccaggccgacaccctggacgagctggcgcgcagccagtgcgaaagcttctatcgcggcgagctggccagggccatcgtcggccacgccgagcgcagcggcggctacctgcgcgcggaggacctggccggctaccaggcgaagtgggtcgaaccgatctcactgaactaccgtggctatgacgtctgggagattccgccgagcggccagggcctgatcgccctgatgaccctgaacatcctcaagggcttcgaattcggcgagcgcgactgcgcgcggacctggcatcgccaactggaggcgatgaagctggcgtacgtcgacgggctgcactacatcagccagccgcagtcgatgcgggtctcggtcgaggaactgctgcacgaggattacgccgccagccgccgtgcgctgatcggcgagcgcgcgctcgatcccagccccggccagccgaggccgggcggcacggtgtacctggcctgtggcgacgaggagggcaacctggtctcgttcatccagagcaactaccacggcttcggctccggcgtggtggtgcccggcaccggcatcgccttgcagaaccgcggcgccgagttcagcctcgatccggaccacgtgaattgcctggagccgggcaagcagaccttccacaccatcattcccggtttcctcagcaaggacggcgtgccgctcggcccgttcggcgtgatgggcgcctatatgcagccgcagggccacgtgcagatggtgatgaacctggtggacttcggcctcaacccccaggctgccctcgacgcgccgcgctggcagtggctgggcgggctgcgcgtcggcatcgaacatgccgcgccgcgcgcgctggcggcggagctggcgcagcgtgggcaccaggtggagatcgcctacgactcgaccagctacgggcgcggccagatcgtcctgcgcgacccggccagcggcgtgctctgtggcggcaccgagccgcgcaccgattcgcagatcgcggtgtggtgaggggacccatgtgggtgaggcggggagacctgtccggcggataatgcccaaggcgtatccaccctgcggatggcgaagcaagaagacccggcaggcataggctgccaggcgacccgtactcgagcgcgctccgctacgcaacatcgagagcgccttctggttgtcatgccaccggagtctcccaggccctggcgaatttacgtccgggcgtcctgaaacccgacgaaaaaccccattcggggatgaattccgcccgccgtctctggcatcatccgcgccgcttctcgcccgaacgccggggcggtgatgtgtagaaagaccacgcactgctttgtgtacaaaagtctgctgattctttttgtcacaaatcgtttttgtgtatccagttttcttcgcgctgccaacccaaagtcgagcacgcccctcccgaccacgcaccagtgcaaggcaaaaactgtccttggggtcaggtttttgccgtcgtagagaggttggaggcatttcgccgcctttgtccaaaacactgaaaaaacaggcgttcccttcgccgcaggaaacccggcgaagcgcccgcgccgtcttggcttcgttcttgctatccatggcgaggcctgaccgctcggacaggttcgcccactagaagaaaagctattcactccaggagcgtttcaatgagccgcacactcgccaccgtgatgctagccggggggctactggccgcaggccaggctgtcgccgaagaccatgacatgacgccaacccacgagaccgactcggggccgctgctctggcacaacgagagcctgacctacctctacggcaagaacttcaagatcaacccgccgatccagcagaccttcaccctggaacatgccagcggctggacctggggcgacctgttcatcttcttcgaccagatcaactacaacggcaaggaagacgccagcaacggcaagaacacctactacggcgagatcactccgcgcctgagcttcggcaagctcaccggagcggacctctccttcggcccggtgaaggacgtgctgctggccggcacctacgagttcggcgaaggcgacaccgaggcctacctgctcggcccgggcttcgacctggcgatccccggcttcgactacttccagctcaacttctactaccgcaagcccgacggcaaccgcgtgcgcgccggcgcctggcagatcaccccggtgtggtcctacaccattccggtgggcaactccgacatcctcatcgacggctacatggactgggtgatcaacaacaagagcgccagcaccagccgccgcaaccagagcgactatcacgccaacctgcacttcaacccacaggtcaagtacgacctgggcaaggccctcggctacgagcctaagcacctgtacgtgggcctggagtacgactactggtccgacaagtacggtgtgaaggactcgcagtacttcaccaccgaccagaacaccgcaagcttcctggtcaagtaccacttctgagtccgtcgcgcggggctgccggccgggccccgccagcgcgccccgtcattgcgcgccgtgcatcggcacggtgcgcgacggtcgccttcgtcgtccttgcgtttgcctcccgttgttcgctcgacccacgccgggcgcgccctgcagcctgagcggcaggaataagctgatcacctggacagctttttgcagaagccgtgcatcctcctcctgtccgaggagcgccacttgagacggcccgatgcatagcgaagaccagcgccccaacgacctcatctacggcctcgacgaccggccgcgcccgcttcccgccttccttgccgcgctacagcacgtgctggccagcttcgtcggtatcgtcactccgccgctggtgatcggctcgctgctcggcctcggcgagcacctgccatacctgatcagcatggcgctgatggtttccggcgccggcaccctgatccaggcgcgccggccgttcggcatcggcgccgggatgatctgcctgcaaggcaccagcttcgccttcctcggcgccgtgctggccgccgggatgctggtgaagcagcgcggcggcggtcccgaggagatcctcgcgatgatcttcggcgtgtgcttcttcggcgccttcgtgcagatcgtcctcagtcgtttcctcggccatcttcgccgggtgatcacgccgctggtcaccggcatcgtcatcaccctgatcggcgtcagcctgatcaaggtcggcatcaccgacctcggcggcggagccggggccacggacttcggcgcaccggccaatctcgcgctgggcgcgctggtgctgctgagcatcgtcctgctgaaccgctcgcgcctgccctggctgcgcctggccgccatcgtcatcggcctggcgctgggtaccctggcggcctgggcgaccggcctgttcgttccgcgggcgttgcccgagctgccgctggtcagcctgccgcagccgttccgcttcggcttcgccttcgactggatggccttcctgccggtggcgctgatctacctgatcagcagcatcgagacagtcggcgatctgaccgccaactgcatgctctcgcggcagcccctggagggaccggcgtacctgcagcggttgcgcggcggggtgctcggcgacggcgtcagttgcctgctggcagccaccttcagcgccttcccgaacaccaccttcgcgcagaacaacggggtgatccagctcaccggggtggccagccggcacgtcgggatctatatcggcggcgtgttgctggcgctcggcctgttcccctgggtcggcgcgatcctccagcagatccccaagccggtgctcggtggcgccaccctggtgatgttcggcagcgtcgccgccgccggcatccgcattctcggccagaccgcaatggaccgccgcagcgtgctgatcatcgccgcctcgttcggcgtcggcctcggcgtggccgcgcagccgaccctgctcgaccagatgccggcggtggtgaagaccctgttcgactcggcgatcaccagcggcggcatcaccgccatcctgctcaacctgctgctgcccgaggagcgcgttgccgaagcggcgcaggccagcgcgaagggcggcgccctggggcgctggcgcaagccgctgggttgatacgggcgtttgcaaatttttccgcgcctggcttgtgtcccgcggccgggctggggtatcaacgcggggatcacgccgatggaaacctgcgcatgaccctgacagtgcccgcccacgacccggccgcccgcgacaagccggccgggcgcatccgccagaagaacgaggaggcgatcctcgccgcggccgaggaggagttcgcccgccacggcttcaagggcaccagcatgaacaccatcgcgcagaacgtcggcctgcccaaggccaacctgcactactacttcggcaacaagctgggcctctacacggcggtgctgagcaacatcctcgaactctgggacagtaccttcaacaccctcggcgtcgacgacgatccggccgaggcgctggcccgctacatccgcgccaagatggagttctcccgccgctacccgctggcctcgcggatcttcgccatggagatcatcagcggcggcgagtgcctcaccgcgcatttcaaccaggactaccgcagctggttccgcggccgcgccgcggtattcgaggcctggatcgccgccggccggatggacccggtggatcccgtgcacctgatcttcctgctctggggcagcacccagcactacgccgacttcgccagccagatcggcctggtcaccggccgcaagcgcatgtccaggcaggacttcgccgccgccgccgacaacctggtgcggatcatcctcaagggctgcggactgaccccgccggcggcctgaacgcgatgccgagcaccctgcaaggcctcgccgaataccgcgaggaaatccgcaagagccgcttccacaccatcgccgcgccggtggccgacgaggacgaggcgcaggcgttcatcgccgcccaccgcgacgcttccgccggacacaactgctgggcctggaagtgcggcgcgcagtaccgcttcagcgacgacggcgaacccggcggcagcgccgggcggccgatcctggcggccatcgagggacaggacatggactgcgtggcggtgctggtcagccgctggttcggtggcatcaagctcggcaccggcggcctcgcccgcgcctatggcggcggcgcggccaagtgcctgcagcaggcgccgcgcagcgagctggtcgagcgctgtcgggtgcgcttcgcctgtgccttcgccgaccacgcgctgctcaaggcgcgcagcctggcgctgggcgccagcgtggcggccgaagactacggcgccgacggcgtcgtcctgaccctggagttgccggtggcgcgcttcgaggcgcttcaggcgctgctggtggacctcagccgaggccaggtgcggctgcagcggctggacgcctgaggaggctcagcgcgctggagccgggcgggaaggggcaggaagcggcgggagcgcggcgaacacgcatttgtcgcggccgctgcgcttggcgtcgagcagtgcggcgtcggcgcgattgacggtctgcgaataggtttcgccgatgcggtgttcggtaacgccgacgctggcggtgacgctcagcgcctcggtgccgacgcgtaccgccagggtccgtacgctgtcgcgcacccgctcgagtaccgggccggcgtcctgcaggcgggtctgtggcagcagcaggaggaattcctcgccgccccagcggccgcagaggtcgtattcgcgtagctcggactccatggcccgggcgatttccaccagcacccggtcaccgctgtcgtggccccaggtatcgttgacctgcttgaagaagtccacatcgagcattgccagcacgtagctctggccgtggcgctgggagcgttcgttctcctccctgaggcgctccagcagcatgcgtcggttgggcaggccggtcagcgggtcgcggatcgaggcttccttcagcgccaggttgaggtcgcgcatcatctgctggtagcggtcggagatccgcgccaccttttccaggcgccgcagctgcttgtggtagcgctcggacagcgacaggttctgctcccgcgccatcgactggaaaccgtcggagatccgggcgatgcgctccagccgcaccagttgctccagcgattgctggcgcaggcgggccagcgcctggtgcagcggatgcccgtggaactgcggatcggccagcaggccgtcgatccaggcgtccagttcgcgttcgcggctcatcgtcggctactcgtcgtgggcctggatggcgaaggggaagctgcagtcctcgcggaactcctcggccagctcggcgacccgttcgttgcgccggtcgtagtgccagcgcaggctgaccgggcgaccgccctggtgggcctcttcgagcaggtcgaggatgtccatcatggccttgatcgaactggtgttcaggtacagcaggcgcaggtccagttccagcggccgctgcccggcggcgaggaagcgctcgacccagtcgatcacctggccgaacagttcataggagttttccgggtaggaatcgccttgcatggacaggcgtccggcctgccagtcgccctggatggcgggcgtggactgggtgccgggtatgtgcaggtcactcatgatggtgttcttcctaaaacacggggtcagatcacggcgcgcaggctgaagaaggcgcgcccgtcgggctgttccttcagcgatgcggccagtggttcgctggacttgcgggcgatgtccagcaggccgagaccggctccgctggcgcagccgctgtcgcgcgggcggcgtagctgctccttgtaggcggccttgagggcggccttgtcgaggttggcgatggcctggatgctgcgcaccaggctctggccgtcgtcgcgttccaccaggttgccggcggacaccacgtagtggccgtcctcgttgcgggcgatggctaccgtggccgccgcctcgtgttcgccgtagcccttgagattggcgtagtggcggatgttctgggtcatctcgatgtacaccgcgaagacgtccatcgcttcgctcggcttggcctgttcggcgtgcaggtagttgcgcagcgcgtggcctatctcctcgatcaggctgcgcgagatcggtccgttgaagcagagcaggatgcgttggcgggtgtagctttcacgcatggccagcaggtctagcgtttccatgggtgcccctagtcgaatcggaaggacaggatggtgatgtcgtcgcgttgcgggtgctcgccctggtactcggcgagcgtcgccacgaaggcctcggcctgctcggggagcggctgccgcgcgtggtcgcggagcatgtcggcgaagcgccggctgccgaagccgaagccgtgttcgccgccggcctggtcgaggaaaccgtcggtgctcaggtagaaggtccagcccggcgccagcggtacctcgatgttgcggtagtcgccacggcgcttgtcgccgatcgcccggcgcgcgcccttgagttcctggacctcctcgccgtcgctggcgtacagcgagatcttcgccccggcgaaggccagctggcggcgccggcggtcgacccagaccagcccggcatccatgttggtggccagcgcctgggggatctgctcctggctgagcatgctgcgcatcgcctggtcggtctcgccgaggatcgccgccgggtcgcggctgcccaccgcctcgatggcgtggtcgatggcggcgcgggcgagcatggtcatcagcgcgccgggcacgccgtgaccggcgcagtcgaccacgccgatcaggtagccgtcggcctgctcgcggtacacgtagaagtcgccgccgaccacgtcgcgcggtttccacaggatgaagtgatgctcgccgagggtggcgctgagctggcggtcggggaggatcgcgcgctggatcaggctggcatagtcgaggctgtcgccgatcttcttctgcgcggcggccatctcgcggttggcttcctccagcgcctgggtgcgctcctggaccttgtcttccagctcggcggtgtgccggcggacctggtcggccatgctggcgaaggccttcgacagcgagccgatctcgtcctggcgcgccagcggcagcggcgtgtcgtagcgcccggcggcgatcgccttggccgagcgcttgaggctgcgcagggggcgcaacagcaggcgctcgacggcataggcgaagcccagcagcagggccaccagcaacagcaggaacgtgcccgccagcggccaaagccagcggttgtcgaggacctgggcggcgtgcaggtcgacggcggtgagcacgtaccagcgcagttggggaatgtaggccacggcgaagagttgctggcggccgtcgaggccggcccacaggcagtgcaccgagccggccttggcgcgggccaggcgcatggcctcgcgcagggcgtcgcgctgttccggctggtcgagcaggtcgaacacccggtggcgttcgctggcgccgccggcggcggagctgtaggcgatcaggcggcggtccgggtgggcctggatggcgccgtcgtcgccgacgatcatcggcgtcacgcccggctcgcgggcgatgatgaagtcgtcgaggaagccgctcaggtccaggccgctgccggccaggccgatgggccggccctggtcgcggatcaccaggttgaaccagaccttggtcaggttcagcttgctgtcgacattgacgttgatgttgtaggcggcgctgttgcgcagggtattgaagtaccaggcgtcttccgggtcgccggcctccagggtgtagcgcggccgttcgctgtagggttggcggccgtcgttgaagtagtagtggtgggagccgctggcgatgatgaagtaggcgtggtcgcggaagtcgccgcggtagccctcggcctcgcggaagaacagcgcgcggcgcgccgggtcgtcttccttcagcagccagtcgcgggtcaccaccgattcggcgaaacggcgcgacaacgccagttcgcgggagaccggggcgaggatcttctgccggtgcagcagggtgaagttcttcgcgtaggccaggccgaagtgcgtacggatgtcgtccatcgcgcgccagcccagcagcaccgccgggaccagtgccagggcacaggccagcaacagcgccaccaccgatttgccgcgcaacccccagttcgccgccatggctatccctatcagtttctcgcccggcccgcggccgaaatcatggatcgaaagcgtgtgtcgaacttttggcgaaagggccaattgtgcagatgtgcattatttcaggcaacgtaatttggttttatttcgccattaatttgacgtcacaatgatggcgagcaggcaaaggcccgtggttcgggcctgtcgtcggcggggtctcggcgggggaggttgcgggggggcggcgaaaaagcgcagcgggccggccagaatcccgctcagaggcggttgccgctgccgcgccgggcggcttgctggagcagcgcggcggcgatccgttcgagcggcagcacgtcttccgcggcgcccagttccaccgcttcgcggggcatgccgtagaccacgcaggtagcctcgtcctgggccagggtgtagccgccggcctggcggatcgccaggagcccgcgcgcgccgtccttgcccatgccggtgagcaggccggcgagcaggttgcgcccggcgcagcgagccagcgactcgaacatcacgtccactgccgggcggtggccgttgacctgcgcctggcggttcaaacgcaccacgtagttggcgccggagcgctgcacctccatgtggtggtcgcccggcgcgaccagggcgtggccgggcagtatgcggtcgccgtcgcgcgcttcgctgacgctgagccgggtcaggcgatccaggcgctcggcgaagctgcgggtgaagccgggaggcatgtgctgggtgatgaccaccccgggactgtgcgccggcaggccgagcagcacttccttgagcgcctcggtgccgccggtggaggcgccgagggcgatgatcttctcggtgctgagcagcggcgccgcgctttccggcggcgccggcgcgtccgccgcacggcggcgcaggcgggcgcgggcgacggtcttgagcttggcgcggatttcctcggcataggcctgcatgccttcggcgatgcccagccggggcttggcgatgaagtccaccgcgcccagttccagcgcgcgcagggtggcttcggaaccgcgctcggtgagcgaggagatcatcagcaccggggtcggccgcgccttcatcagcttgtcgaggaaggtcaggccgtccattcgcggcatttccacgtcgaggctgatcacgtccggcgcgtgctgcttgatcaggtcgcgggcgacgaaggcgtccggcgcgcagccgaccaggcgcagctccgggtcggcctggatgatctccttgagcaggctgcggatcagggcggaatcgtcgacgaccaggacactgatgggcatggcgggctctcccggagagtcagaacaggtcgatggggccgccgtccgcgttgcggtcgatacggcggcggtagtcgcgttcacgctgcagcacggtgtcgttcttcagctccaccagggacttcaccaggacccggccattgcgcgggaagaagtagatcttgcgcgggaaggcctccagcacgtcgctggcgagcagcgggatacgctcggtggccaggtagtcgagggtgaactcgacgttgcgctggccgatggcggcgctgatctggcgcagtaccgagccgccgccgaagaccttggcctgcaggcgctcgcggctggcgccgagggccagcatgcggttgatcagcagttccatggcgtggctgccgtagcgcgccgacggcgaggccgggtcgccgccgaggccgcgctcggggagcatgaagtggttcatcccggcgatgccgttgagcgggtcgcgcaggcacaccgagacgcaggagccgagcacggtgacgatcaccaggtcttcgccgctggcgaagtattcgccgggcaacagcttcaccgcatcgcaggcgaagtacggatcgtagtagcggttcagcggcgcgccttcccgggcctggagattcatcgcgatcaggccgggctgtagacggtctggccgacggagcgcaccaggtggctggcgtggacgaagttctccgaatgcccggcgaagaacaggccctccggccgcagcagggccaccatgcgttccagcaggcgggtctgggtcggcttgtcgaagtagatcatcacgttgcggcagaagatcgcgtcgagttccccggcgatcgaccagtctgcctccagcaggttgatctggcggaactccaccagttgccgcagttcctccaccacccgcgccttgccggcgttgggcccggtgccgcggaggaagaagcgtttcttcagcggcgccggcatctgctccaggcgctccagcggatagacgccctggcgggcgcagtcgagcaccccggtatcgatgtccgaggcgacgatcttcaccggcggatcgaagctgcccagcgcctccaccagggtgatggcgatcgaatagggttcctcgccggtactcgccgccgccgaccagatgcgcagcgggcgatgccgctgcaactggcggcgggcgaggtcggcgagcagggggaagtggtggcgttcgcggaagaatgcggtgaggttggtggtcagcgcgttgacgaacaactgctgctcgcccggctcgcggtcgaggtgggtgaaatattcggcgaagctgccgagccgcagcaggcgcaggcgccgcgagaggcggctatagaccagttgcgccttgctctcggccaggctgatgccggtcagccggtagagccgctcgcgtacttgctggaagtcctcgcgggtgtagtggaactcctggttgccgaacaccggcgaaggcgtggaggtgggcattggcgtcgggtttccctggtcgaccctaagggcttgccgccctccgcctggcggaggcgcggcgtggtctcagaactcttcccagccgtcttccttgcgcgccttgctggcccgcgccatgccgctgcgggccagcggcgccggcgcgctggggcgtggcgcggacggccgcgcgctggcgagctggaccacgctcggcggagtgtccagcctgaacaccgccaccgactggttgagcaggcccgcctgctcctgcatggcctcggccgcggccgcggcttcctccaccagcgcggcgttctgctgggtcatgtcgtccatctgcgagaccgcgctgttcacctcttcgatgccggtgctctgctcggcggaggcggcggcgatctccgacatgatgtcggtgacccggcggatcgctaccacgatgtcgctcatggtctgtccggcctgggccaccagggtgttgccgttctccaccttgtccaccgagtcggagatcagcgtcttgatctccttggccgcggcggcggaacgctgggcgagggtgcgcacttccccggcgaccaccgcgaagccgcggccctgctcgccggcgcgggctgcctcgaccgcggcgttgagggcgaggatgttggtctggaaggcgatgccgtcgatcaccccgatgatgtcggcgatcttgcgcgccgactcgttgatcgaggacatggtgctgaccaccttctgcaccacggtgccgccctgggtcgccacttccgaggcattggccgccagcgagttggcctggcgggcattctcggcgttgagcttcaccgtgctggtcagttcttccatgctcgaggcggtttcctccaggctcgacgcctgctgctcggtgcgcgccgacagttcggcgttgccgctggcgatctcgctggcggcggtgttgatggtgtcggcggcctcgcgaatctgcccgagcatccgcgacaggctttgtgcggtgtcgttggagaaatccttgagctggccgaaggtgccctggtagtcggcctcgatgcgctgggtgaggtcgccctgggccagcgccccgagcatccgcgagacgtcgcgcaagccgcggtcggcggtatccaccaggctgttcaggtccttcgccagcctgaggaagaagccttccttgccggcctcctcgacgcgcttgctgaagtcgccggcggccgccgcctgcaccagttgcgagacttcctgctcggcgcggtgttcctcggtgcggtcggtccattgcacggcggagccgaggcgttcgttggcgtcgttgaacactggcaccacatcgagggagaagcgccggccgccgaggttgagctcggccttgtgcacgccggtgaggttggccagcaggtgccgctggtgcgccggattcttgtggaacacgtcgatgttggcgcccatcaggcggccggcgtcgaagttcggcaactgcttgcggatatccgcttcggcgcgaccgagcatctcgctgacggtgcggttcatgtagatgatgttgaggtcgttgtcggcgatcatcacgttggccgagacgttgtccagcgcgctcttgatccgcgcgttgtaggccgccgtggccagttgcgccgaggtcgcctcggcggccccgcgcaggcgttcgcgaacgccgtcgatggcttcggtgatctgcgccttcttgcccggcaggcggtccatcagcggctcgaagttgccctggccgtaggcggtgaccacgctgaccaccttcatcttcaccgcgatgtgcgcggccaccagttcgttgacgcccttggcgatgcgcgccgcgcgaccttccaggcgttcggcgggaatcgtctggtcgatccagccggcttcgtgctggcggctcatctccgccagccccgcctccaggctttccacctgctggagttcggcgcgttgttcgcgcagttgccgctgcagcgcccgcaggctgtcgtagagacgctcgtagccgggcgccggggcctcgccgacggcggtgtcgagttggccgtcggcgaacgactggaggagcgtggcgatccggtcggcgcgttgctgcgccaccgcatgtgcattgaacagacccatttcgatatcccctgcctatccctcgttggcgccgctcaggccgcggcttcgtcgaccagcgccatttcgcggctggtcatcagtctctcgatgtccaccaggatcaacatgcgctcgcccgcggtggccaggccgagcaggtattcggtgtcgaagctggcgccgaactccggcggcggcctgatcgcgtcgccgcccagtgcgatcacgtcggataccgagtccaccaccacgccgacgatgcgccggccgatgttgaggatgatcaccacggtgaacgggtcgtaggtgacctcggcgaggtggaacttgatgcgcaggtcgacgatcggcacgatcgccccgcgcaggttgatcacgcccttgatgaagggcggcgcgttggcgatcgcggtgacctggtcgtagccgcggatctcctgcacgcggaggatgtcgatggcgtactcctcgcggcccagggtgaaggtcaggtattcctgcgccgggccgttcgcctggcttgcctcagtgccgttcatcggcggtgtcctcccgcgccgccaggcgtggcagcgcatcgacgtcgagaatcagggcgacgctgccgtcgcccatgatggtggcgccggcgataccctccacgcggcggaaattctgttccaggctcttgatcaccacctgctgctggccgaccagttcgtccacctgcagggcgaagctgcgcccctcggactcgaggatcaccacgatgccctgctccggcgccggcgcttcgccgccgatgcgcaacagctcgtgcaggctgaacagcggcaggtactcgccgcgtacgcggatcatcgcgttgtcttcgccgccgaggccgcgcacgtcgtcgctgcgcgcctgcagcgactcgacgatgtaggtcagcggaatcacgtagttgaccgcttcgacggcgacgatcaggccgtcgaggatcgccagggtcagcggcaggcggatgccgatgcgagtgcccatgccgggcgccgagtcgatgtcgatgcgcccgcccatggcaccgatgttgcgcttcaccacgtccatgccgacgccgcgtccggacagctcggtgaccgtctcggcggtggagaagccgggcatgaacaccagttgccagacctcggcgtcgctcatcccgtcatgcaccggcaggttgcgctcgcgggccttggcgaggatacgcggacgcgacaggccgcgaccgtcgtcggaaacctccaccaccacgctgccgccctggtggctggcggcgagcttcaccgtgccgctcgccggcttgccggcggcgaggcgttcggcgggcgtttcgatgccgtggtcgatgctgttgcggacgatgtgggtgagcggatcgctgagtttctcgatcacgctcttgtccagttcggtgtgctcgccgtgcaggtgcagctcgacctgcttgcccaggcgcgtggcggtgtcgcgcaccagcctggggaagcggctgaagatgaagttgatcggcagcatgcggatcgacatcaccgactcctgcaggtcgcgggtgttgtgttcgagctgggccagggcgtgctgcaggcgctcgtggcggctcgggtcgagctgctcgccgagctggccgagcatggcctgggtgatcaccagttcgccgaccaggttgatcaggctgtcgatcttttccacgctgacccggatcgagccggactcgccgtcgccacgcacgggcgcgactgcgcccctggccggcgcggcgacggcttgcgcgggcgcactgggcgcggcggggctgccgggggcgccgtcgaacaggccgaaggcgcgttcctccgccggtggggaacccggtgcctcatcgaagaggccgaacgcttcgctcgcggccggtgcgccgggcgcctcgtcgaagagcccgaacgcttccggcgcggccgctcgttccggagcgcccgggccttcgtcgaagaagccgaaggcatcgtcgtccgcggtttccctggcgggactggcgggcgcgtcgtcgaacaggccgaagccttcctccgccgcttcctgttccggcacccgcagccagccgcgcagccgctcgaccgtctccagcaacggcaccccggggtcgggactgccgctgcgatgggcgtcgagcaggcgctgcaacacgtcgcgggcttcgaggaaggaactgatcatgtccggccgcaggtgcatctggccacagcggatgcggtcgagcagggtctccagttcgtgggtgacggcggtgatgtcgtcgaaaccgaacattccgctggaacccttgatcgaatgcgcggcgcggaagatgccgtgcagcgtctcgctgtccggccggtccaggtcgagaccgatcaggaggagttcgagggtggccaggtgttcctcggtttcctcgaagaacacctggagaaactggctcatatcctggggcatgggacctcccccgcgggggaacgggaatcagggcaggaccttgcgcgtcacttcgagcagtttcggcgggtcgaacggcttcaccagccagccggtggcgccggcgctgcgtccctgctgcttcatcgcgtcgctcgattcggtggtcagcatgaggatcggcacgctgcggtagccggccaggttacgcaggctgcggatcagcgacaggccgtccatgttcggcatgttctggtcggtgaacaccaggctgtagctcttgctctgggccttgccgaggccttccttgccgtccgcggcctcgtccacctcgtagccggcggacttcagggtgaagctcagcatctggcggatagacgccgagtcgtcgacgatcagaatcggtttgcccatggtcttgcgtcctcacggtgtccctaccgcagcgccaagctcggcggcgaaggtggtgtgtgccaggtggctgtgacggagggctctgatggccctttgctagttccagtaaagacaatgtccggtggatttcaattattggcgccggtttctcgtcggatagttatccggttagacggattggctatcgatacccctcagaacaattccacttcgcccacgttgacgctgttctggctcaccgggctgggcaagggccggcgcagttcctcgacctcccgcgcgacccgttcgggccattcctggcgcggccgcgcctccagcgcgccgaggccgagggcgaaggcgccaagacgcgcatggtgcttgcgcatctggccgagcaactggctgcccatgtcctggaattgcagggcggtgaccgccgcgtcgacgccctggccgacttccagcgagagccggtccagttcgtggatgaccttcagggtgtgccggttcatcgcctccaggtcatcgagcatgccctggatcttgtgcttggaatcgagggcgaaggacatgtccttgtcggccagttgcgagatcgcgctctcggcgtcctggatctcgtggtggaccacgtcgacgtgcttgcggatggcggcggaaaactccgtggagcgggtcgacagcgcgcgcacttcatcggcgaccacggcgaagccgcggccgctctcgccggctcgggcggcctcgatggcggcgttgagggcgagcaggttggtctgcttggcgatggcgtccatgtcctgggtcgactgcaggatctcggtgatcttcaggcgcacctggtccatgcgttccaccagttgctgcgaggtccggctggtttccagggtagcctcgacgaacaggctgagggtctgctgggtggtcctgacgaagtcctggaagttgatgccttcgtcgacctggccgcgcccgtcgtagcgctcgatcagcgaatgggacaggccgcgctgggtatcgatgcgttcggcgaggccgtggaagctgtcgctgagctggcggatcgccgaatgcagcagttcgtcgatctgccgggcgtgaccgtccagttgcgcggtttcgtcggcgagcgcccgttgcgccgcgctccaggccggcgaagcggcatccgcctgcgggttggcattcgctaccgcttgccgaggggcgcgcaggaggaggacgagcatggccaggctggcgaaccaaccgagcgccaggaccagccagacgccgaggccgacggcatgcagcccggcgcacaacgcccagggtagggaaagcaggcccagcttcagcagcaggggccgggatggtaacgaaacaccgagggactcgcgcatgctgcactccatgtgccggatcggagcagggcttccaggcggtccctcgggaccgtgcggaagacgccttccaagctcgtcggcggcgttttctaaaactagagtcccaatcggtaatgtcaaactgccgtttttccggcgaggccggtgccagggccttttcccgtttgccgaggcgacggatggctggcgctagccggttgggaaggcggagaagcgccgggccaggtcctggcggcggaagtagtcgacgacgaagtcgacgaagacccgggtcttggccggtagcagcttgttcgccgcgtagtagaggctggtgttgccggcgtcgacgtaccagtccggcaggacccgcaccagggcgccggactccaggtaggcataggcgtgctgcatgcataccagggtgatgcccaggcccatggcggcgacctcgcaggtggcttccgggtcgctcatggtcatgcgttcgcgcagctcgatcggcgcctcctcgccgttgcgacggcgcagcggccaggagcgcacgcggccggtctgcggcgagcggatgcggatcccgtcgaagccgcccaggtcgcctggatggcggattggcggcttgtcgcggaggtaggcgggcgaggcgaggaggatcaggtggcccggcgtcaggttgcgcgccaccaccccgggcggcagttcgaaaccaccgccgatggcggcgtcgaagccttcgccgatgaggtcgacctggcgattgtcgaaatgccagtcgggcacgatgtcgggatagcgttcgaggaactcgccgagcagcggcaggatgtagtcgcggccgaaggccagccccatgctgaccttcaacgtgccgctgggttggttgccgacgctggagacgttggcgagagcggtctggatgccctccaggctgccgccgacctcttgcaggaaacgctccccggcttcggtcagggtcaggcgccgggtgctgcgctggaacaggcgcacgccgaggttgctttccaggcgggcgacgttcttgcccaccccggccggcgtcaggcccaggcgcctggcggcctcggcgaagctaccggcctcggcgctgcggacgaagcactggatgttgctgagggtttccatgggaaagggcccgcataaaccattggtatcggctgaatatagcgattacccgctaccaggtctgcaatggacgacggaaactcggggcctgtctatccactccgatggagatttccatgtccgtatcctctgcatccctcgccggcaaagtcgccttcgtccagggcggttcccgcggcatcggcgccgccatcgttcgccggctggccgccgaaggcgccagcgtcgccttcacctacgtcagctcggcggacaagtcccgggccctggcggccgaactcgaaggcgccggagccagcatcctggccctgcatgccgatagcgccgacgcggccgcgctcgtcgccgccgtcgacgaagcggcggctcgcttcggacgcatcgacatcctggtcaacaacgccgccgtcctcgccctcggttcggtggaagagctgccgctggccgacttcgagcggaccctggcgatcaacgtgcgcagcgtcttcgtcgccacccaggcggcggtcaagcacatgggcgacggcgggcgggtgatcagcatcggcagcaccaatgccgaacgcatgccgttcgccggcggcgccacctacgcgatgagcaagtcggcgctggtcggcctgaccaagggcctggcccgcgacctcggcccgcgcgggatcacggtgaacaacgtgcagccgggtccggtggataccgacatgaacccggacgacggcgacttcgccgaggccctcaagggcctgatggcgctgccgcgctacgcccgcagcgaggaaatcgccagcttcgtcgcctacctggccgggccggaagcggcctacatcaccggggccagcctgaccatcgatggcggtttctcggcctgacccgggtcgcctcgttccacccggcgaagtagcccctctccccgaccttctggccagacgttccctcctgaagggagagggcgaggggagaggttccgcttatcgcaccaggaaaggcgaagccccctctacgacaccggtctcgctgacgtatcgcttccaatgctcgatcagctccgccagcttgcccggctggctgtcagcgaggtcgtggatctcgcccgggtcgcgggccaggtcgtagagctgccaggtggccgggcccaccggggccggcaggtacaccgccttccagtcgccctggcggatcgcacgcatgccgaacagctcccagccggtcacggtgttctcgtcgtgggccgcctcggtctcgccggaaagccaacccagccacgacctgccgcgcggctcggcgatctcgcggccgcgccagcgcttgcctgggtggcggacaccggcgaggtcgaggagggtcggggtgacgtccatcaccgtggcgaaggcatggctgatcgcaccctgccggcttagccgcgggtagcgcaccagcgctggcacgcgaatcccgccctgggtggtgaacgccttgtacaggcgcgatggtgcggtggccgcctgggcccagcgcgggccataccagacgtaggaattggcgcggccgatgttttccaggctgttgtcgtagtgccggtcgagaaagcccagcaggtccgggccgaatttcgggaacgcctccagcagggcgccttcggcgccgttgtcggacatgaacaggacgaaggtgttgtccagctcgccctgccggcgcaggtagtccacgaccctgccgatgttccagtccatgcgctcgaccatcgccgcgtagacctccatcgcccgcgccgacttagcccgttcctcgtcctccagggcctcccactcgcgggtcagggcgagcaccggatgggcttcgacgtccgcttccaccaggcccagctccttgagccgggccaggcgttcctggcgcagcgcttctggaccggcgtcgtagcgaccgtggtacttctcgacgatctcccgcggcgcttgcagcggccagtgcggcgcggagaacggcaggtaggcgaagaacggccggctctggtcgcgctccttgaggtattgcagcagcttgtcgccgaaggcgtcggaggaatagaagccctccggcagcgtgtcgaggtagcgctcgtcttccacgtagagcgctggcgtacccttgaggatgcgcggagtgctttcgtcgtagggcggctcgaaaccatagtggttggcggcgcccggcagcagcgagaaggaacgctcgaaaccgcgtgcatggggcgtctgttccggcttcaggccgaggtgccacttgccggccatgagggtctggtagccggcctcgcggagcagctccggcagcgccaccacgcgctcgttgagatgcccttcgtaacccggcttgccttccagttccggggtcagcgcctcggccatggtgccgatcccggcgatgtggtggtcggtgccggtgagcagcatcgagcgggtcggcgagcaggtcgaggcggtgtggaagtcggtcaggcgcaggccggcgatggccagggcgtcgaggttcggcgtggcgatctcgccgccgaaggcgccgatatcggagaagcccaggtcgtcggcgacgatcaccaggaagttggggcgtttgctcatgcgcgggtctcgtctggatgggaggagaaggtggggccctcgcccccgcccttcccgcagggggaaagggccagggcaaggggcttttcagcaagcgaggaattcgaagggcaggttttccacccgtcgcggcggcggcgcgacgtactcgccgtcggcggtcagttcgtgcagcagcgcttcgcgctggcgcaggaagtcgaagccaccgcgctcgcgcggatgcgccaggcccacctcgaccacccgcctgatccgccccggacgtggctccatcaccaccacccggtcggccaggtagagcgcctcctcgacgtcgtgggtgaccagcagggtggtgatacgggtacgccggcggatcgccagcaactcttcctgcaactgctggcgggtcagggcgtcgagggcgctgaacggctcgtcgagcagcagcaggcgcgggctggccaccaggccacgggcgatcgccacgcgctgggccatgccgccggacaactggtgcgggtaggcacgctcgaagccgtgcaggccgaccaggcggatgtattcgtcgatccgcgccgccttgtcggtttcgccaagggcttcgttgaccaggccgagggcgacgttctgctgcaccgtcagccaggggaacaggcggtgctcctggaacacgatgccgcgttcgccgccgatgccggcgattggccggccgtcgacgcggatctcgccgtcgtagtcgcggtccaggccgatcagcaggcgcagcagggtcgacttgccgcagccactggcgccgacgatggcgatgaactcgccctcgccgatctccaggtcgaactgctggatcgcttccagtcgccggccgtccacggcgaagtgcttgcgcacctggcggaagctgaccagcggggtgcccgtggcgggcgcggtgaatgcgttcatgcgtgtctccagcgcgtggcgcgcgcttcgatgcgttggccgagggcattgagcagggcgccggtgaggccgaccaggagcatgccggcgccgatcaggtccatgcggaacaattgctgggcgccgatcatcaggctgccgatgccgccgtcggagggcatgaagtactcggcgccgatggttcccagccaggcgtagatcagcgccaggcgcaggccggcgaacaccgacggggcggcacccggcaggaccagccggagcagccttcgccagggacccaggcgcagcacccgggccgcctcgccgaggctcggcggcaggctggcgatgccgcgctgggtggccagcagcagcgggaagaaggcggcgattgcgacgaacgtcagcttggccggttcgcccaggccgaaccaggcggtgagcagcggtacccaggcgaagatcgccacctgccgcagtgccgcgaaagtggggccgaagaagcgttccgccggacgccacaggccgagcagcaggccgccgaggaaacccaggccgccgcccagcaggagcccgccgagcgtgcgcttcaggctgtcgaacagggcgcctgggaggctgccgtcgagcgctccgctccaggtcgcccgcgccacttccagagggctggcgaggatcgccggatcgacccattcggcgctgctcgccgactgccacaggagcagcagcgccagcggcggcagccacacctgcaggcgctgccagccgcgtcccggcgggcgccggcggaattcgccggtggcggcttgcggccagtgcagcaggcggcggtcgagccactggatggcgcggtccatgcccaccccgaccaggccgatgatgaggatgcagacgaacacgatgtcgagcatgaacagttgccggccctgcaccatcaggtagccgataccctcgctggaagccagcaactcgaccgccagcagcgaggtccagccctgcgccagggccaggcgcagcccggtgaggaaggccggcagcgccgccggcaggatcagccgccagaccagcaggcgtggcggcaggcgcagtactgcggcggcttcgcgcagcttgggctgggcgtcgcgcacgccgaccagggtatggatggtcaccggcaccacgaccgctttcaccagcaccaccagcttgagcagttcgccgatgccgaagaacagcatgaacagcgggatccaggccagcgtggggatttgcgcgagggcgctgaaggtggggaagaccaggcgctcggcacgcggactgaagcctagccaggcgcctagcgcggcgccgctggcgaccccggcgagcaggccccaggccaggcgccgcaggctgatcgccaattcgctccagagttcgccggcgagcaactcgcgggcgctctgccagaccagctcgggagttggcagcacctgggctgacatccagtggcgatggctggcgacccaccacagcagcaccagcccgagcggcagcaaccagggcagcaggccgtcccccagacgccgggcgaaagccgcggagggcggcggcgccaggcgcggcaggggccggctccaggcgggcgaaagggttttatcgatattcttcatgggaatataaatagccgaatcaatgcattttttcgctaagaagggccatttaaagaaaggcaccaggcagcggcaaatgcatttggagaatattttccatgctctggctgcatatgacgcggagaggcccgtgcggcctgtcatactgcttgtggttataaaaaaatgaatttttattatttattttcgaggcgccgctgtgcatagctagccgcacacccgctcccggcgggaatccctctcttcccgttccaaggagccgccccatgaaagcgcttacgtcttccctgctcggtctgttcgccgcgcctgtgctcgccggcctgctcggtgcctacgtgccgctggcgagcgccgctccgccgaaggaaatccgcatcgcggtgccggacgtcagcgccggcagttcgcactcgggcggcggcgtggtcgacgtgctctacacccgccagttgctggagaaggagttcgccaacgacggcatcgcggtgaaatggagcttcttcaagggcgccggcccggtggtcaacgaagcgttcgccaacggccaggtggacttcgcctacctcggcgacctggcggcgatcatcggcaagtccggaggcctggacagccgcctgctggccgctaccgcgcgaggggtcaaccactatctcggcgtgcagccgggctccgggatcaagaccctggaggatctcaagggcaagcgcgtaggcatcttccgtggcaccgccagccagttgtcgttcgacaatgccctggccagcgtcggtctcagcgagaaggacctgaaggtgatcaacctcgatttcagcgccgccctgtccgccctcgcagccaggcagatcgatgccacctggggcctggccggactgttcgccctgcgcgaccgcgggctcgcggaaattccgctgagcacccgcgacctgaacggcgccggcaccctgcaggcgctgctggtcggctccggagccttcgtcgatgcccatccggacatcaccgagcggctgctcaaggtgcagttgcaggcccaggactggctggcccgcgaggagaaccgcgacgcctacatcgagctggtgtcgaagcaggccagctacccggtggtgatcctgcagagcgagtaccgtggccgcaagctgggcgacgccctgtcgccgcgcctggacgccgatttccttggccggctggatgcttcgatccaggcggccaagcgtttcggcctgatccgtcgcgaattcagcgccgagcagtgggccgcgccggaactgctggaggcggccggcaagctggcaaaggccaaggccgtggcgcaggcggcggagtgacgccgagccggggacggccgaggcggcgccgtttcgtagcaatttgtaatatgtttcgagattcttgcaccgacccaaccaatgactggatcgagcgaagtatccagccgttggtcggggattctgcgtatatcgcgtcatgaaagtttcacgcgggtaatccgcaggttattccgcgatcatttcgttcgttaatcgccccatatattcagatacaaaatcggcactgccaattcttccagttttcccttccgacaattctcccgaccctccccggaaacaactccaagtatctcgcggcgaaccgccgcgtcccgcatctagcctgcccatcactacgacagcgcggcgccagcgccgggcctcgccctgcgcgtcggcggcattcctgattttcttccggaggagagcggtcatatgaatctcgatagcaaattgttcgacgcgacactcgatctcgaacgcgtgaaagtttcggtgagaacgctggtgaagttatcccgccaggaacaatcggcgatcatccggaccctcaacgagtttggtttcctgctgttgcgcagcgaacagggcgaagacaggcaggaacttctcgcgctcaaggagttgttcggccgcgccgccccccacccgcgcgccgacgccgacggcatcgtgccgatcagcaatgcgcggtatgtcagcggctacctcggctccacgccgctggagcacaagctgcacaccgacggcgctttcctcgacatcccggagcaattgtgcagcctgcaatgcgtgcgcaacgcccgggagggcggggagaccctgctggccagcgccggactggccttcgagcgcctgcgccggcgcatgccgaccaagcatctcggcctgctgcgcggcgacgccctgaccatcgtgcgcaagcaccagagcagcacccagccggtgttccgcctgaacggcgaggcgctgggcatcaagttccggcagaacgacggggcggccgaggtggtcgagcaccctgtggcggtggaggccttcgccgaactggtggcggcgctcgaggatccggcctgccaactgcggatcaagctcgaaccgggggaaatcctggtgctcgacaacaccgcggtgttgcacgggcgcaccgccttctgcgccaacgaactgcgcgagatgcgccggctcaacttcgacggccacggccgcctgcgggcggagctggaactgggcttcaaggtggggttgtgatcgcacagttcgtcgcggtggtgctgccgatcctgatctgcaccgggatcggtttcgcctggagccgttccgccgggccggtggatacccgcgcgctggtgttcctggtggccaacgtcggctttccctgcctgctgctgtcgtcgctggaccgccccggcctgtccattggcatggtggccggggtgttcctcgccaccgcgctggcggtgctggcgttcgccctgctgggcctggtcgccctgcgcctgctgcggatgccggtgcggcgctacctgccgtcgatcatgctgccgaactccgggaacatgggcatccccatcgcctacctggccttcggcgaggaggcgctggtgtatgcggtggcgttctccaccctgatccaggtgggccacgcgacgctcggcgtctggttcgcttcgggcgatatcaccccggcgagcatcctgcgcaacccgatgatctatgccctggccgtggcgctgggcctgatcgccctgggctggagcctgccgccgccgttgcgcgatgtgacccgcctgctgggtgggattaccgtgccgctgatgctggtgatgctcggcctgtcgctggccggtctgcgcctgcacgagacctggcggccgttgctgctgtctctggtgcgggtctggggcggtttcgcggtcggctatgggatcgctgccggcctgggcatggaggcggtggcggcgggcaccttcgccatccagtgcgggatgccgaccgcggtgctcacctacctgttggccaagcgttacgacggaccggtgaacgaagtggcaggcatggtgctgatcaccacgctgctggtgctgctctccacgcctttgttcatccagttgctgccgcgcgcgtgaagacgatccgggccgccccgcggggcggcccggggcgtcaccagatcgagcgggagtaatcgacgaccagccgggtttcgtcgatgtcgccgtcgagatagctcgcgttgccccggtgccaggcctgcgaggcgcgcagcgcgaggccggcgagggggcccgccttgacccgataggcgaagccgaggtcgctttcccggtgccgcccgtcacgcccgtagagtccggcgtagatgctctcggcggcactgctggcgctggccccggcacggccgcgggcatgcagcgcatgcaggctgagcccaggcaggccgagcgcgccgaggtccaggtcatagcgtaattgccaggaacgctcgcccggtccgttgaagtcggagtagcccaccgagttggccagtaccatggacgcgctggagcgcccgtcgccgaaggccatgtagtcgaacggctgctcgccatggacacgctggtaggccagggtgatgcgctgcggcccctgttcgtagcccagggccagggagctggccagggtgtcgatgcggccgaagcggctctggccgctgtcgcgggtgcggtaggcgtcgaggtcgacccgcagcgcgcgctccccgcccagcggctggcgatggctggcgccgaaataggcctgctgccagatgtcgtcgaagcgcgaggcgtagagcgacagttgcagccgctccgtggcctgccattgaccgccgaggaagccgaccgcgtcgaggcgcaccggataggcgccgaggcgtccgtagacggtgctgatgtcgccgcggaccttggattcgccggggccggaggcggcggtgaagcgcccaccctcgagcagcagcccgtcgaacgagcggtcctccagcagcaggccgtaggccatgccggccagcgtgcggttgctgctggcggcgaacaccggcgcgctggtggtggtctggccgtacttcaggcgggtttcgccgtggcgtagcctgagggcgccaccgaccttgccgtagcgatggtcgggatggccgtcggcgccgaccggcaggttgccggtgccggtgcggccgccgccgctgtccagttgcaggccgagcatggcatgggcgtcgaggccgaagccgaggctgcccggcgtgtagccggaggcgaactggaggcgcaggccctgggtggcttcctcacggtagccgttgcgctcgctcctgggcttgaagcggttgcgcccggcgttgttcgggctgtcgcggtagtcgcggttgaagtagtaggtgcgagcgaggaactgcagttcgctgtcctcgacgaagcccccatccccggccgtcgcggccgccccttcggaaagcgtgccggcgaccaggccggcgaatacagcgcgtctgagattttgcatttattgttttctcccacctgagtgccaggtgggcgcagtctcggaagtcgctccgcaggccgcttgtgtttccctgcctcggcttttgccggggcctgccattggcaggggctggcatgtgcaacggcaggccgggtcaagcatttcggaagtcaccgacggagagtgtggcgtcggccgtcatccgcaacggccgtgggtgggagcctaggctcccgatgcaacctcgcctcagggaatacgcttcatgaacaacaagaccctatgcccttcgctcttgctctgcctttcgctgctcgcaccgctgtcttgtctcggggagaccgccgccgcgccctatccgctggcccacccaccgcgcctggccgactacctcccgccgccgccggcggcggactcggctgcggccgtcgccgatctcggcgcggtgctggaggcgcaacgcctgcgcacgcccgaacaggtacgccgggtacgcgcccacgaccagtgggaggacaacgtcttccccttcgccggcgacctgctgggcgcctcgttcgacaaggaacgcctgccgctgacccggagtttcttcaaccgcgcccaggaaaacctggtcgaggtgctgatgccggcgaagaagcacttcgcccgcccgcgtccctacgaagtgacaccgaaggtgaagccggtgctgccgccgccggagggggagtcctatcccagcggccacaccatggacagctacttcaaggcctcgctgctgagcatgctggtgccggagcatcacgatgcgttcttcgcccgcgccgaggagcatgcgcagagccgtgtgctggccggcgtgcacttccccagcgacctggaaggcgggcagaccgccgccgcggcgctggtggcgagcctgctggccgatccggcggtggccgccgacttcgccgcggtgcgcgaggagctgcgcggcgcgctggggttgccgaaactccagtagaggaagggaaaccgcgcggcggctcaggccgccgcgtgttgcgcctggtccagttccaccagcgtctcgatcatcgccttggccgctgccgaaagccggtagccgctgcggctgatgatgccgcagcgggcgctgaggctatccaggttctgcggcaggttgcgccactgtagcggttgcagttcgccgcgctgcaggtaggggcgcagggtctcgtcgctggcgatgccgatggcgtcggtctggcggacgatacggatcagcgcgtgcatgttctcgcagcggatgttggcggcgaagtcgatcttgccgctgaggttcgccagcagcttgcggatgcccgggggaatcagggtcgaggccagcgggtagttgaacaggtcgttggtggacaggctgtccttgcccagcagcggatgttgcggacggcagaagaactggccgcggcgcggggtcagcgggcgcgtctggaagttcgggtcggcctcgaagtcgcggatgtcggcgacgaagaattcgatctcttcgcggagcagggcgcggctgagcttttcccagttgtccacgtccaggctgatctgcacccgcgggtggcggttgatgaagtcggccaccgcgtccggcaccagttgctgggccggcgccggcccgctgccgaagcgcagctcgccggcatccagcttgttcaactgggcgatctcgtggatcaggttggccgacccctgcaccaggctcagcgcgtgttgcagcaccacctggccttccggcgtcgggcgcaggtccttgctgccacggtccaccaactgacagccaagctcctgctccaggccctggatgctgcggctgaaggccggctgggtgatgcccatggcgtccgccgcgcggacgaaactgcggtgttcggcgagggcgatgaagtaacgcagttggcgcagatccatgatgctttaccggcattggaaatattggacaaaggcatttgccgttcgggatgtgctggttttaaatgcaagctcttattccgtcaacaaagaacaaattagaaaaatatgcgatttagtaataagcatagatagaccccaggagctgaacatggtccaccgtgcctttgccgccccacctccgccgttccgaatgcccttccgcgtcgccggcggctgtcgcccctgacagtcgcccggggctgagccgtccgccggcccccttcgaacctttcgccagatcgctgccttgcgcggcatggccgcctgctgcctgcgtccggctgcgccggaaccgaggacattcacgatgaagcaccactaccgcctgccgctccgccgaacgccgcccggcggctccgactacgccctggccctgctgctcgccctcggcggtgctttgccggccagtgccgccgatgctcccgcgcccgccgaggaagcgccgccgctggccagcagcgttccggacaaggccgatacggccctgggcaaggtcactgtcaccgcgcgtcgccgcgaggaggattcgcagaaggtaccgacgccgatcaccgtgctcggcggcgagactctcgaggcccagcgcatctcccgggtgcaggacctgcagcaggtgctgcccagcgtcaatgtcgcctacatccatgcgcggcagtcgagcgtcgccgtgcgcggcatcggcaacaaccccgccagcgacggcctggaaggcagcgccgggatctacctcgacaacgtctacctgggacgtccgggaatggccgtgttcgacctgctggacatcgagcaactggagctgctgcgcggtccgcagggcaccctgttcggcaagaacaccaccgccggggtgctgaacatcagcacccgcgcgccgaccttcactgccgagcgtaccgtcgaggtctccggcgggcaggatggctacttccagggccgcggcacggtttccgggccgctcggcgaaaccctcgccggacgcctctcggcctatcgcacccgcgacgacggctacatcaagaacatccacgacgacaactatctcaacggcggcgagcgccagggcgcgcgcgggcaattgctgttcgagccgaacgaggacttcagcctgcgctggatcgccgactacaacgaggaggattcgagcaacggcagcatggtggtctacggcggcgccgagcgtttctggcagcgcgccgcgctggtcggcgcttcgccgttgcgcgatccgcagcgcaggaaggtcaacatcaacggccgccagcacgtcagcgtgcaccagggcggcagctcgctggaggccaactggaacctcgccggcggctaccgcctgacctccatcagcgcctaccgctactggcacttcaccccggccaacgacgagcaactgaacgtctcggcgatcaacgacaccggggtggaagtgcacgaccggcagttctcccaggagatccgcctggcctcgcccaccggcggtgccttcgactacgtggtgggcgcctacgcgttcaggcagaacctcggcaacaagaccttcacctcctacggaccgttggccgacctgtacctgctcggcgccaatctcggcgcgctgaacgacacctactcgaaggccaacggcaagatcgagaccgacagcttcgcgctgttcgcccagggcacctggcacctcaccgaacgcctggacttcaccgccggcctgcgtggtacctacgaggagaagaacgccaaggtcgagcgcttcgctccgctgggcggcgcggcggtcggcggggtcggcgcggcggtgcgcaacggccagctcggcgcctacgattccggcgatctcagccagtacaacttcgccccttcggcgttgctcagcctcagctaccagttcagcgacgacctgctcggctacgccagcctgtcccacggcgagaagtccggcggggtcaacctggcggtgggcagcgcaccgagcgccggcgccgattcgctgctggtcggaccggagcgcgccaacgacgccgagctgggcctgaagagcacgctcttcgaccggcgcctgctgctcaacgccaacctgttctggaccggcatccacggctaccaggccaccaccctgtaccaggcgccgggctcgacccagttggtgcaggtgctggccaacgccggcagcgtgcgctcgcgtggtctggagttcgaggccaccgcgctgccgttgcgcggcctgaccctgaacttcaacggctcctataacgacgtcacctacctgtcgttcaaggatgccccgtgccctgcggaagtcagcacccggcccggcgcgccgagcagttgcgacctcaccgggcagcgcgtggtcggcgcctcgaaatggatcgccaatctcaatggcgaataccagtggcgcctcgacgaccgcctccaaccctacgtcagcgccagctacgcctaccgctccgccgccgagggcacgctggacaactccgacctttcgaagatcgacggctacgccctggtgaacctcgccgccggtctgcgcagcgatctcggcgacggccaactggacacctcggtatggctgaagaacgccttcgacaaggactactacctgagcgccttcgccagcatcaacggctcctacaccgcatcggtggggcagccgcgcacgctcggcgtatcgctgcgctacgacttctgagccttcacccacgcagtaccccacgcatgaggaacatgacatgagcaatgcagcacaagccctcgccacgccggtacggctcgacgtccggccggtcgccggacggatcggcgcggagattcgcggtgtgaccctgtccggcgaactggacgccgccaccgtcgaggcgatccaggccgccctggtacgccacaaggtgatcttcttccgggaccagagccatctcgacgaccagacccaggaggccttcgcccacttgcttggcgaaccggtcgcccaccccaccgtgccgtcccgcgaaggcacccgcttcctcctcgagctggatggcgccgaaggccgccgggccaactcctggcataccgacgtgaccttcgtcgaggcctacccgaaggcctcgatcctgcgcagcgtggtggccccggagtccggcggcgacaccgtctgggccaacacggcgagcgcctacgccgacctgccggcggagctgcgcgagctggccgaccggctctgggcggtgcacagcaacgagtacgactacgccggggtcaagcccagcgcctcggtggagcagttggagaactaccgcaaggtgttcacctcgaccgtctacgagaccgagcacccggtggtccgcgtgcatccgcaaagcggcgagcggacgctgctcctcggccacttcgtgaaacgcctgaagggtctttcgcagcatgactcggcgcatctcttcgcggtgctgcaggggcacgtcacgcgcctggagaacaccgtgcgctggcgctggcaggccggcgacgtggcgatctgggacaaccgcgcgacccagcactacgcgatcgacgactacggcgaccagccgcgcgtggtgcgccgggtgaccctcggcggcgacgtgccggtaggcatcgacgggcaacgcagccggacgatccggaaggcatgacggacccggccctctcctcgccggggagggcgaccacaggcagaacgaacccgcgaggcccccttacatgagccaatccgccaccgcccggcaacccgaacccgaggtcgccgaggcattccgcatcacccccctggaggcgccgctgggcgccgaagtccgtggcctcgacgcgcgccggccgctggcgccggagcaggtcctggcgctcaagcaggcgctgcgcgagcaccacatcctggtgttccgccagcagcacctcgacgatgagcagtacttgcgcttcgccaccctgttcggctcggtgttccagccgccggcggacatcccggtgctgtcctcgggtggcgacggcaaggtgccggacatcgtcaaggtggccaacaccggcgacggcgaactgggcaacttcgccctgccggcacacatcgaccaccaatggacgccggtgccgtcctccggctcgttcctctacgcactggaggtgccgtccagtggtggcgagacgcgcttcaccaacctggcgcgcgcctacgagagcctcgacgaggcgacccggcgcgagatcgatggcctgcgcctgatcaactacaaccccttcatccgcctgcgcgagggcggctacggcggcggtttcgccacctaccgcacgccggacatcgaaccgatccagggcagcgagcacccgctggtacgcacccacccggaaagcggccggcgcgtactgttcctcagcgcccacaccgaggtggagattcccggctacgaccccgcgcggggccaggcgctgatcggtcgcctgcgcgaacatctggcgcgcccggaactgagctacagccacgcctggtcggtgggcgacatcgtctggtgggacaaccaggccgtgctgcatgcgcgcaacgccttcccggccagcgagcggcggcgcctgaagcgcatcagcctggcgggcagccgtccgttctgagccggcatcccccagcgtgcgccggctcctccgttgccgaccggcgtaggtcgctgcgcgccgctctggcgagccccttccgttccggcgaatagctagcagaactgcgacatgctgtcgcagttctgccatttctccgcgtctatcctgcccatagggcaattcgcctttggtctaacgagctggcctgcagcgcccatagaaaggcgattctgactttgtagtcaaagttttgctttgctactttggccaggcatcagggattgctgatacagcgtattaaaaacattaattaccccggcattccgcggcgctggcaggatattttcccgtcgaagccgtagcggcttgacctgatagccggtcattcacggcagggatgtcatattctcgcgcgggcttccccggataggctgcacgccagtcaggacgcgcccggcggcgatgggcgggaattgttggtcggtttatgacttgtagtttctctgtcgtatgccttcagaacttgttgaaggcttttcggctcgattgcacaatgccgcgccaaggttcgttcgcgaatcgcggtatgtgagctagacctccgcagccggtgcgccatccgcagtgccccggactactcgacaatcacgcaggagattcgtgagtgcagatcggtgtccccctcgagacccatgccggtgagacgcgggtttccgccaccccggaaaccgtcaagaagctgatcggccaaggccaccaggtgatcgtccagagcggcgccggcgtcagcgccagccagccggacagtgcctatgaagccgccggcgcgacgatcggcagcgccgccgaggccttcggcgccgacctggtgctgaaggtggtcgcgcccagcgccgccgagctggcccagatgaaaagcggcgccgtgctggtcggcatgctcaaccccttcgacaacgagaacatcgcccgcatggccgagcgcggcatcaccgccttcgccctcgaggccgcgccgcgtacctcgcgggcgcagagcctggacgtgctctcctcgcaggccaacatcgccggctacaaggcggtgatgctcgccgccaaccactacccgcgcttcatgccgatgctgatgaccgccgccggtaccgtgaaggccgcccgcgtgctgatcctcggcgccggcgtcgccggcctgcaggcgatcgccacggccaagcgcctgggcgcggtgatcgaggcttccgacgtgcgtccggcggtgaaggagcagatcgagtcgctcggcgccaagttcgtcgacgtgccctacgagaccgacgaagagcgcgagtgcgccgaaggcgtcggcggctacgcgcggccgatgccggcctcgtggatggagcgccaggccaaggccgtgcacgagcgcgccaagcagtcggacatcgtcatcaccaccgcgctgatccccggccgcaaggcgccgacgctgctgcacgaggcgaccgtggcggagatgaagccgggctcggtggtcatcgacctggccgccgcccagggcggcaactgcccgctgaccgaggccgaccaggtcgtggtccggcacggcgtgaccatcgtcggccacagcaacctggccgcgctggtaccggcggacgcctcggcgctatacgcgcgcaacatcctcgatttcctcaagctcaccctgaacgccgaaggcttcagcgtgaacctcgaggacgacatcgtcgccgcctgcctgatgtgccgcgacggccaggcggtgcgcaagaacggctgagccgctgcgtcgggaagcttcgataacgataaatgcgcacgcctcgcgcctgcgccctgaagaccggtgaaaacgatggatatcatttctgacgggatctacaacctgatcatcttcgtgctggccgtgtacgtcggctaccacgtggtatggaacgtcacccctgccttgcacaccccgctgatggcggtgaccaacgcgatttccgcgatcgtcatcgtcggcgccatgctcgccgccgccctgaccgtgaccccgctgggcaaggccatgggcaccctcgccgtggccctggccgcggtcaatgtgttcggtggcttcctggtcacccggcgcatgctggaaatgttcaagaagaaagcgccgaaggcggggggccactgatgagcatgaacctggtcaccctcctgtacctcatcgcctcggtctgcttcatccaggccctgaaaggcctgtcgcacccgaccacctcgcgccgcggcaacctcttcggcatggtcggcatggccatcgccgtggccaccaccgtcggcctggtgttcaagctgggcgcggagatcgccaccaccggcgtcggctacatcgtcgtcggcctgctggttggcggtaccgccggctcgatcatggccaagcgcgtcgagatgaccaagatgcccgagctggtcgccttcatgcacagcatgatcggcctggccgcggtgttcatcgccatcgccgcggtggtcgagccgcagtcgctggggatcgtcgcgcacctgggcgacaccattcccaccggcaaccgcctggagctgttcctcggcgcggccatcggcgccatcaccttctccggttcggtgatcgccttcggcaagctctccggcaagtacaagttccgcctgttccagggcaccccggtgcagttctccgggcagcacctgctgaacctggtgctcggcctggcgaccctcggcctgggcctggtgttcatgttcaccggcaacctcaccgccttcgccgtgatgctggcgctggccttcgtcctcggcgtgctgatcatcatccccatcggcggcgccgacatgccggtggtggtgtcgatgctcaactcctattccggctgggccgcggcggggatcggcttctcgctgaacaactcgatgctgatcatcgccggctcgctggtcggctcctcgggtgcgatcctctcctacatcatgtgcaaggcgatgaaccgctcgttcttcaacgtcatcctcggcggcttcggcgccgaagccgacgccggcggcccggcgggctccaaggagcagcgtccggtgaagtccggttcggccgacgatgcctcgttcctgctgaccaacgccgacagcgtgatcatcgtccccggctacggcctggcggtggcccgcgcccagcacgcgctgatggaactggcggagaagctgacccatcgcggggtcaccgtgaagttcgccatccacccggtcgccgggcgcatgccggggcacatgaacgtgctgctggccgaggccgaggtgccctacgagcaggtgttcgagatggaggacatcaactccgagttcggccagaccgacgtggtcctggtgctcggtgccaacgacgtggtcaacccggcggcgaagaacgatccgaagtcgcccatcgccggcatgccgatcctcgaggcctacaaggccaagaccgtgatcgtcaacaagcgctccatggccagcggctacgccggcctggacaacgagctgttctacctggacaagaccatgatggtgttcggcgacgccaagaaagtcatcgaagacatggtcaaggcggtggagtgattccccgctgagtccaccagaaccccggcccaggccggggtttttcgttttcgcgggttgtccgcgcagcgttctccgccgcttccaacggcgaaaacaccagcctttcaggaatatttttcatgcccgcaaggcatgggtttttcgtcggatcgctgtagcccgccaaccacgcggcctgtggcgacaggggcgaaacccatagctccagaagttatttccataacaaaaataattacttcaggcgctaagcctccttgccaatcatgcaactccctgcgccgctaggactccagcacggacctgagcggccatcgagttcgtcagtgcaaggagcttttcatggcaacaccccagcccgtcgatgcccgcacgcagccctggcgcgagacgcccggcggcgacctggtggcgctcggtcggccggttcgccaggcgttgcacctggttcgccacaacccggcacagggtcgggtgctcagccggcgcgagacgatcctgctggtcctgttcgccctgaccctgcacggagcggtgatccattggctgagccagcagagaaccccggcgctgcccgaggtgccgccacaggtgccgccgatgaccatcgagttcaccgccccggcgccgccggtggtggaaccgccgccgcccgagccgttgccgccggtggtcgaggaaccgccaccaccggtggtcgacgagaacgcggtgaagccgccgccgccgaagccggtgcccaagccgaaacccaagcccaagccgcaaccccggcccaagccggcgccgaaggccgtcgagccggctccgcccgcgccgccgcaacccgccgcgccacccgccccgccggcgccggccgccgccccggcgccgctgacgccgccgtcggcgaacgccggctacctgcacaacccggcgccggaataccccgccctggccatgcgccgcggctgggagggcaccgtgctgttgcgggtgcatgtcctcgccagcggcagcccgagcgagatccaggtgcagaagtcgagcggacgcgaagccctcgaccaggccgcggtgaaagcggtcaagcgctggtccttcgttcccgccaagcgcggcgacaaggccgaggacggctgggtcagcgtaccgatcgatttcaagttgaactgaatctgcagcgtcacgaggagcatccgtcatgagtctgttaaccaccccgctcgaatccgtcgaaggcgccgtcatctggctgctggtcggcttttccgtggtcacctggggcctggccctggtcaagggcgtgcagttcgcccggcagaagcgccaggaccgccagttccagaagcagttctggagcgccaccagcctcgactccgccggcgagcaggcgcaggacaagcagggcgccggcgcccgcgtggcccaggccggcttcgccgcgatccaggtgcaggacaacggccagcccgacctggcccagtcgatcaaccaccaggaccgtctcgaacgcgccctgcgccagcagatccagcgcgagcggcgttccctggagtcgggcctggcggtgctcgcctcgatcggctcgacctcgcccttcatcggcctgttcggcaccgtctggggcatcatggaggcactcaaggggatcagcgcggccggctcggcgagcctggagaccgtggccgggccgatcggcagcgcgctgatcgccaccggcgtgggaatcgccgtcgcggtgccggcggtgctggtctacaactacttcctgcggcgcctgaagctgaccgccgccgacctcgacgacttcgcccacgacttctacagcctggcgcagaagagcgcgttccgcgtcatcgtccatccctccgccgcgcgccaggccggcaacccctcgcgcaacgtgaaggaggcgtcctgacatggccttctcgacccaggacagcgacgaagtcctttccgaaatcaacgtcaccccgctggtcgacgtgatgctggtgctgctggtggtgttcatcgtcaccgcgccgctgctgaccaactcgatcccgatcaacctgccgaagaccgaatcggtggccccgccggagcagaaggatcccctggtggtgagcatcgatggcgccggcaagctgttcgtcaacaaggacgagatccagccggagctgctggagagcaacctggccgcggccaaggcgaaggacgccgaggtccgcgtgcagttgcaggccgacgaaggggtgaactacggccaggtggcgaaggccatggcttccatcgagcgcgccgggatcaccaggctggcggtgatcaccgcacgctgaagcgaatccacgccgtccggcgcaggccgggcgggcaacggtttcgaccgctccgatccgggcaggggagagcggtcttttttattccggatggacgctcctcgggtgtgtccgccgaggccgggctcgcgaatgcgtcgcgcaccctgtccggcgctcgcacgtcccacgcctgggcgctcaggcctggcgtgccggcgcctcctgctccttggcgtcctccgttccttcgacttcccattcaccggcccagtcctcgccgaacagttcgctgggatgctgggtgcggctggcgccgttgccgcagcccatagattccgccgagcaatagcggtcgcaaccccagcagatgcgctccggatggctgggatggagaggaaatttcttggccatgatcctgtcccgatacctgatgcctgcgctcaggtataccgccgatggcttgcgccgcccaggcgttgccgcggaaaagtggcttcggcttgcgctggatcaactcgattggcgtatatgtattaatagaatattaaaattgctttttattccttagagaaaaaaggctgcgcccttacacttccctggtgatgaatttttctggagggttctccatgcacagcgaacgcgtccgttatgtgttggtgcccggttggtacggctcggaagacgcccattggcaaagtcactggcagcgcgcgctgcccaatgcctcacgggtcgagcaacaggactggatcaccccgctgcgcgccgactggatcgccgagctggacgccgagatccgccgccagcccgggccggtggtgctgatcgcgcacagcctgggttgtgtgacagtggcgctgtgggcggcccaggccgagcgccgggtgcgcgaccaggtacgcggcgccctgctggtggcgccggccgacgtcgagcgcgagagctgcgccgaggcgctgcgcaacttcgcgccgatcagccgcgagccgttgccgttccccagcgtgctggtgggttccgacaacgaccaggcctgcagcccgcagcgcgccatgcacctggcccgcgcctggggcgcggagacggtgatcctgcccgaggccgggcacatcaacgtgaagtccggccacggcgcctgggaggccggctaccgtcacctgttccgcttgcagtacctgatcgacagccaggctcgtcgccgcgcctgatcctccagatcgttaaccttggcgtaacggttcgtcgcccggcttgattgaacaggcctggcggcctgcctaacgtggctcctcacgacagcgtgaaacctggagccgacatgacgacaccgatctctcccccgccgcagtggtcgcggcgccgccaggaaaagcagcggcgcctcgagcgcgtgcgcggcctggctgacggcgcggtgctgccgcgcgaacgcctggtcgccgcgctggaggcgctgatcgcgccgggcgatcgggtggtgctggaaggcaacaaccagaagcaggcggatttcctctcccgttcgctggcgcgggtcgatcccggcaagctgcacgacctgcacatgatcatgcccagcgtcggccgcccggagcatctcgacctgttcgaactgggcatcgcgcgcaagctcgacttctccttctccggcccgcagagcttgcgcatcggccagttgctcgaagacggcctgctggagatcggcgcgatccacacctacatcgagctgtacgcgcggctggtggtcgacctgatccccaacgtggcgctggtcgccggtttcgtcgccgaccgcgaaggcaacgtgtacaccgggccgagcacggaagacaccccggcgctggtggagcccaccgcgttcagcgacggcatcgtcatcgtccaggtcaaccgtatcgtcgacgacccgcgcgacctgccgcgagtggatatcccggcgtcctgggtggacttcgtggtcgaggccgaccagccgttctacatcgagccgctgttcacccgcgacccgcgccacatcaagccggtccacgtgctgatggcgatgatggcgatccgcggcatctaccagcggcacaacgtgcagtcgctgaaccacggcatcggcttcaacaccgcggccatcgagctgatcctgccgacctacggcgagtccctcggcctgaagggcaagatctgccgacactggaccctcaacccgcacccgacccttatccccgccatcgagagcggctgggtcgagagcgtgcactgcttcggcaccgagctgggcatggagggctacatcgcccagcgtcccgacgtgttcttcaccggtcgcgacggctcgctgcgttccaatcggatgttctgccaactggcaggacaatacgccgtcgacctgttcatcggcgctaccctccaggtcgacggcgacggccattcctccaccgtcacccgcggacgcctggccggtttcggcggcgccccgaacatgggccacgacccgcgcggccggcgccactcgacgccggcctggctggacatgcggggcgaacccgaggccttgctggagcgcggcaggaagctggtggtgcagatggtcgagaccttccaggacggcggcaagccgaccttcgtcgagcgtctcgacgcgctggaggtggcgcgccagaccggcatgccgctggcgccggtgatgatctatggcgacgacgtcacccatgtgctcaccgaggaaggcatcgcctacctgtacaaggcgcgctccctggaggaacgccaggcgatgatcgcggcggtggcggggatcagtccgatcggcctgcgccacgatccgcgcgagacccagcggatgcgccgcgaagggctgatcgcgctgcccgaggacctcggcatccgccgcaccgacgcctcgcgcgagctgctggcggcgaagagcatcgccgagctggtcgagtggtccggcgggctgtaccagccgccggcgcgtttcaggagctggtgatgaacgccatcgcgaacctcgcggcgacgccgtgcgccgacctcggcgaatgcctggccgacctggcggtggacgccctcatcgacgaagccgaactgtcgcccaagccggccctggtggaccgccgcggcaatggcgcgcatgccgacctgcacctgggcctgatgcaggcctcggcgctgagcctgtggccgtgtttcaaggaaatggccgacgccgcacagcggcatgggcgcatcgatgcgcgcctgcgcggcgtccttggccaactggggcgcgacggcgaggcggcgatgctgcgtaccaccgaaggcgtgaacacccatcgcggagcgatctgggcgctcggcctgctggtcgcggccgccgctctcgaaccgcgccgcacgcaggccggcgaagtggccgcgcgcgcaggacgcatcgccctgctcgacgatccggcggccgccatcggcgacagccacggcgagcgcgtccgtcggcgctacggcgtcggcggcgcccgcgaggaggcgcgtctcggcttcccccgcgcagtgcgccacggcctgccgcagctatggcgcagccgcgaaggcggcgctggcgagcagaacgccaggctcgatgcgctgctggcgatcatgagcgtcctcgacgatacctgcgtgctgcaccgcgccggccgcgtcggcctcgccgcgatgcaggatggcgcccgcgcggtgctcgccgccggcggcagcgccagtctcgccgggcgtcgccgcctgtgcgagctggaccgccgcctgctggcgctgaacgcttcgcccggcggcgccgccgacctgctggccgcctgtcttttcctcgatcgcctgcccgccgtgtccggtgggtgggctgggagtctctgagatggaaaccctgaccttcgaatttcccgccggcgctccggcgcgcggtcgcgccctggccggctgcgtcggctccggcgacctggaggtgctgctcgagccggccgccggaggcgcgctgagcatccaggtggtgacctcggtaaacggcagcggcccgcgctggcaacaactcttcgcgcgggtcttcgcggcgtccacggcgccggccgcgtcgatccgcatccacgatttcggcgccactcccggggtggtccgcctgcgcctggagcaggcactggaggaggctggccatgactgacgtcgcccgcctgctggcgctgcgcagcttcaccgaactgggagcgcgccaacgcgcccgggccctgcttgacgcgggcagcttccgcgagttgctcgatcccttcgccggcgtgcagtcgccctggctggaacgacagggcatcgtgccccaggccgacgatggggtagtggtcgcccgtggcctcctcgacggccagccggcggtgctcgccgccatcgaaggtgctttccagggcggcagccttggcgaagtcagcggagcgaagatcgccggcgcgctggagctggccgccgaggacaatcgcaacggcgttccgacccgggccctgctgttgctggaaaccggtggcgtgcgcctgcaggaagccaacctcggactggcggcgatcgccgagatccaggcggccatcgtcgatctgcagcgctaccagccggtggtggcggtgatcgccgggccggtcggctgcttcggcggcatgtccatcgccgccgggctgtgcagctacgtgctggtgacccgcgaggcgcgcctcggcttgaacggtccgcaggtgatcgaacaggaggccggcatcgctgaatacgactcgcgcgaccggccgttcatctggagcctcaccggcggcgagcagcgcttcgccagcggtctcgccgacgcctacctggccgacgacctcgatgaggtacgcacctcggtactcgcgtatttcgccaagggcctgccggcacggccgcgctgccgccgcgccgaggattacctgcggcggctgggcgacctcgataccgccgagcaaccggatgccgccggcgtgcgccggctgtaccaggggctgggccaaggagatgcaacatgagccaaccgttcgcttcccgtggcctggcctggttccaggcgctggccggtagcctcgcgccgcgtcccggcgatcctgcttcgttgcgcgtcgccgatgccgagctggacggctacccggtgcgtttcctggccgtcgtgcccgatcccgacaatccgttcccgcgcgctcgccagggcgaggtcgggctgctcgagggctggggcctggccgccgccgtcgacgaggcgctggaggccgaccgcgaggcgccacgcaagcgcgcgctgctggccatcgtcgacgtgccgagccaggcctacggccgccgcgaggaggccctgggtatccaccaggcgctggccggggcggtggatgcctacgcccgcgcccgactcgccgggcatccgctgatcggcctgctggtgggcaaggcgatgtccggcgcgttcctcgcccacggctaccaggccaaccgcctgatcgccttgcacgatccgggggtgatggtccacgccatgggcaaggccgccgccgcgcggatcaccctgcgcagcgtcgaggaactggaggcgttggcggcgaaggtgccgccgatggcctacgacatcgacagctacgcgtcgctcggcctgctctggaggacccttccggtggagaccgtcgaggtgccgtcgacggcggacctggtgcgggtccgcacctgcctgggcgaggccctggccgatatcctcggcggcccgcgcgacctcggcggccgcctcggcgcggccaaccgcgaggcgtcggcgcgggtgcgccggctgctgcgcgagcagtggtgaattcaggagcgagccgtggtcatcgcgaacagctcacagcggggctccagccggcgacggctcgctcctgatccgatgcgtcgcagggcagggccggaaccccatgacttgctcctgggcatggcgccggcgcatttgccggagaatgctccggcctgggtctgcgcggcactgaaggccggctggccggtggtggtgcgccgtgcgccggcagatcctgcgcgggtggccatcggcgtgcgcggcctggcgcgggagcagcgctgggccggctggatgccgttggcggcaatcacccggcgcttgcgcccggaagcgctgggccagcgcgagccggcgatgctgcgcgatctgccggcctggcgtgccttgcgcgacctgcgtgcgccgctgaacgcgctgggactggcctggggcgtgaccggcggcgccggtttcgagctggccagcggggtcgccgtgctgcatccggacagcgacctcgacctgctgctgcgcaccccgcgcccgttcccgcgcgatgacgcgctgcgcctgctgcagtgcttcgagcagtgtccctgccggatcgacctgcaactgcagaccccggcgggcggcgtggccctgcgcgaatgggccgagggtcggccccgggtgctggcgaaaggcagcgaggcgccgctgttgctggaagacccctggcggatcgcggaggtcgaggcatgagcgtgctgttcgcctatcccggccagggcgcccaacgtcccggcatgctcgcggccttgcccgacgaaccgccggtgcgcgcctgcctggagcaggcggcggactgtctcggccaggcgccggccgaactggagagcgccgaggccttgcacggcacccgcgcggtgcagttgtgcctgctgatcgccggggtcgccgccagccgcctgctggagacgcgcgggcatcggccggggctggtcgccgggctgtccatcggcgcctatccggcggcggtggtagccggcgcgctggacttcgacgacgcgctgcgtctggtggcgctgcgtggcgaactgatgcaggccgcctggcccgagggctacgggatgagcgccatcctcggtctcgaacaggcgcaactggaagcgctgatcctggcggtgcggcgcgagcacccgccgctctacctggccaacgtcaacgccgagcggcaactggtggtggccggcagcgaagcggctctggccgccctcgccgaacgcgcccgtgccgccggcgccagcgcggcgaagcgcctggcggtgagcgtaccgtcgcactgtgcgctgctcgacgaaccggccgcgcgcctggccgaagccttcgccggcatccgcctgcatcggccgcgcgtgccctacctgagcagcagccgggcgcgcctggtcgccgaaccggccgcgctggccgacgatctcgccggcaacatggcgcgccgcgtcgagtggctggcgacattgcgcagcgcctacgagcgcggtgcccgcctgcatctcgagctgccgccgggacgggtcctcagcggtctggcgcggcctctgttcggctgcgccacgccggccttcgaaggctcccgggcggataccctggacgcgctgttgcgcgaggaggaaaagagaacccgataagcgttcgttcgaggcataaaaacaacaacatcgatccgcaaccgaggacaacaataatgattatctacggtgtcgcactgctgtctctgtgtaccctcgccgggctgttcatcggcgagatccttggcgtgctgctcggcgtgccggccaacgtcggtggcgtcggcatcgccatgctgctgctgatcttcgtcggcagctacctgggcaagcgtggcctgctctcggcgaagaccgagcagggcgtggagttctggagcgcggtctacattcccatcgtggtcgccatggccgcccagcagaatgtcctcggcgcgctgagcggcgggccggccgctatcctcgccggcatcgccgcggtcgccgtggccttcgccctggtcccgctgctcgaccgcttcggccggaagaaagccgaaggcgccccgccattgaaaccgcgcaccagcgtgcaggggtgagcgccatgttcgagtccctgaacaaagtcatcaatggctacggcctgatcagcggcttcgccatcatcggcgtgaccatggcggtgtcctactggttgtcggcgcgcctcacccgcgggcgcctgcacggctcggcgatcgcgatcttcctcggcctggtgctgtcctacgtcggcggcgtcgccaccggcgggcagaaaggattggtggacgtgcccctgatgtccggtatcggcctgctgggtggcgccatgctgcgcgacttcgccatcgtcgccacggccttcggggtgaatgtcgaggaactgcgtcgggcaggggtttccggggtggtgtcgctgttcctcggggtcggttcgtcgttcgtcgccggggtcgcggtggccatggcgttcggctacaccgatgcggtcagcctgaccaccatcggcgccggcgcggtcacctacatcgtcggaccggtgaccggcgccgccctgggggccagctccgaggtgatggcgctgagcatcgccgccgggctggtgaaggcgatcctggtgatggtcctgacgcctttcgtcgcgccctacatcggcctgaacaatccacgtacggcggtgatcttcggtggtctcatgggcacctccagcggcgtcgccggcggcctcgccgccaccgacccgaagctggtgccctacggttgcctgaccgcggcgttctataccgccatcggttgcctgctggggccgtcgctgctgtatttcagcgtgcgcggcctggttgggtgagcgggctcgtccgggcaccctctccctgaagggcgagggttggggagaggtcagcgggctggacttccgtccgctatcccgccgcctcctgctccaggcgcaggctgtacatccggcactccgcgagcaatgccagcaggttcgggtcgcgctccttggccttgaggaacaccacgccgatgtgctgctgcaggcgatagcgcggttgcagcgggatcagccgcacgcggttctcgtagaccgcctcgatgcgtttgggcagcagcgcatggccgacccccgagctgaccatgctgaggagggtgaatatgtcgttcacctgcatggcgatctgcggttcgaagccggcctgctggaacacccgggtgccgtcctgatgggtggcgaagccctgggtgagcgtgacgaagggcgtgtcgcgcagggtgctgagatcgatctcggcgagcctggcgtagggcgagtccaccggcacggcgaggaagatgtcatcggagaacagcggcaggtgctcgcagtcgggatcgctgacgctgtcgttgagcgacaccaggatggcgtccagctccatgttcttcagctggtagaacagatcgacgttggagccgaggatcaggtcgatgttcagcgcgctgcgtcgcagcttgagacccatgatcagttgcggcacggtcttcaccgtcagcgaatagagcgcgccgagcttgaagcgctcggcggagaagccggccgcctcgcgggtcaggcgcaccgtgtcgagtacctcctggaccagcttctgcgcgcgctcctcgagcacgtaggcgctttccagcggggtcaggttgcgtccctcgtgcttgaacagcgggcagcgcagggcgctttccagcgagtggatggcgcggtgcacgctgacgttgctggtgcccagttccgccgccgcgcgcgccaggttgccggtgcgcatgaaggcgaggaaggtttccagcttcttgagggtgatttcttcgtcgatcagcatccgcgttcccctggccggtggcgtcgggggattgtgcctgaggtggcgcgggaggggtaaaaagggccgtcatgtcctagcgcgtggcggagcatgacggcctggaaacgccttggggaaggcggagttgcactgaccggatggaatcccgcttcggcagcctgagccgccgataggctaacggaactcagcggatggagcggatggtgcccttgctgccggtgaccttgacgtcgaccttcttgaacaggaagtagtcgttcaccgaaacctcgtagcgcggcgccacgatcaggtcggcattggagttcttcaccgccttgaacgcggcggcggccttggccgaggacaccgggtcgaaggcgccgaggctcaggcccgagccgctttctgcgccgtaggtgacgccgtcggcgaactggctgtcgccgccgaacttgaggaagccgaacaggatattgaccgaggagtctccgctgatcggctcgccgacggcgacgtcggccttgaggtcggttttcaccgcgccggccaccggggcgatgggctggctgacgttgtagctggcgcagccggtcagcgaggccgcggcgaacagcagggcgggcaacaggaacttcttcatctgactctccatgatgattcatcgatgaggcggcaggcccgaatgtccatcgatccctgggcgctgccggactgccggaccggggtggtccggagcgccggccaccctagcaacggaggctttttgccacagtcatcggattcgtctttgtcagaaagaaagttcctcttggaatgtcggaaagctgagggtcagtgccggcgctcggcaagcttgcccagttgctcccggcagtagtcgacgaacaatcgtgccggcttggtcagttgcgcgcgtttcagccaggcggcggcgagcccggaggtggacaccggctcggcgaggtcgaccatgaccaccttcttgccgtcgtaggtgcattccgaatgcgggcgggtgaccagcagggagaagccgaagccctggccgaccatgccgcgcaccatctcgatggacggcgagctgaaggcgatgttcggcgtcaggccgagttcctcgaacaggctgacgaaataggtgcggctgggctgcacgtcgagcaggatcatcggttccaggcacaggtcgcgcagcgacacttgcgcctgcccggcgaagcggtgcccttcggggagcagcgcgtggggtcgttgcggcggcatcagcggctcggtctcgatggtcgagtcgaggtcgtgctcgtagaggaaggccaggtcgaagcgcccggaggtgaggccttgcaccagttcctgctgctcgccgtcgcgtatgcggatctccacccccggataggcctggcgaaagccggcgatcaggcccggcaggtagagcggggcgaccgtctcgaagcagccgatgtcgatctgcccggcgatcacgtcgttgtcggccagggcgttctgctcgaactcgtgggccatccgcagcagttcctgcgccttgcggtagaagcgcgcgccggcgggggtcagcgacacgccctgggcgtggtggcggatgaacagctgcacgccgaagctttcctccagacccttcaccgccgtggagatcgacggctgggcgatgtacagcttgcgcgaggcctcggccacgctgccgcattccacggtggtcacgaaatacttgagttgccgcaaggtataggacgccactgcaagacctcatcggcgcatcatcctccccgggccgggcgtgcgcgcctcgattgttgtgtccgccgcgctgcaagcaagttgcaggccgctgccgagcgtcgcggcgctggccgcgacgacgattgcccgcctgcacgataacccagcacgacgcactttgccggggcacgcctggccagctttttcttatgtcccgaggacatttttaataattttccttcgccgcggcttgcgcgaccatccttccccatcgaccccatggacagcggtccgcctcccggcggtccgggccatgcgtgcagaaccacgaccggcgcagaccggcgagataacaaggagaaggtggggtgttcgaactcagcgattggcaacggcgcgccgcgacacagcgcttcatcgaccaggccctgatcggcggccgccagcgtccagccgccagcggcgctaccttcgacgccatcgatccggcgagcaatcgcctgctggcgcgggtcgcggcctgcgatgcggccgacgtcgacgcggcagtggccgccgcccgccgcgccttcgacgaaggcccctgggcgcgtctcgccccggtcgagcgcaagcgcgtgctgctgcgcctggccgagctgatgctggcccatcgcgaagagctggcgctgctcgactcgctgaacatgggcaagccggtgatggacgcctggaacatcgatgtacccggcgccgcccacgtcttcgcctggtatgcggaaagcctcgacaagctctacgaccaggtcgcgccggccgcccagcagaccctggccaccattacccgcgtgccgctgggggtgatcggcgcggtggtgccgtggaacttcccgctcgacatggccgcctggaagctcgccccggccctggccgccggcaactcggtggtgctcaagccggccgagcagtcgccgttctccgccctgcgcctggccgagctggccctggaggcgggggtgccggaaggcgtgctgaacgtggtgccgggcctcggcgagcaggccggcaaggccctcggcttgcacccggaggtggacgcactggtgttcaccggctccaccgaggtcggcaagtacttcatgcagtattccgcgcaatccaacctcaagcaggtctggctggagtgcggcggtaagagtccgaacctggtgttcgccgattgccgcgatcttgacctggcggcggaaaaggccgccttcggcattttcttcaatcagggcgaggtctgttcggcgaactcgcgcttgctggtggagcgttcgatccacgacgagttcgtcgagcgcctgctggccaaggcccgcgactggcagccgggcgatccgctggacccggccagccgcgccggcgccatcgtcgaccgccggcagaccgccgggattctcgccgccatcgagcgggcgcaaggcgagggcgcgaccctgctcggcggtggccgccagttgacgatcaacggttcggacaacttcatcgaaccgaccctgttcggcgacgtacgcccggacatgcagctggcccgcgaggaaatcttcggcccggtgctggcgatcagcgccttcgactccgaggacgaggccatacgcctggccaacgacagccgctacggcctcgccgcctcgctgtggagcgacgacctgcaccgtgcgcaccgggtggcgcggcgcttgaatgccggaacggtgtcggtgaataccgtggacgcgctggacgtcgcggtgcctttcggcggcggcaagcagtccggcttcggtcgcgacctgtcgctgcattccttcgacaagtacacccagttgaagacgacctggttccagttgcgctgaagacgcgacggacgcgacacgactcgatgccgataacgacaacaagaggacgatcgaatgaacgacacgccgaacgtgcgtgagccggccctgcgccgcgtgctcgggctgggaccgctgctggcggtggccatcggcctggtggtttcccagggcgtgatggtactgatgctgcaaggcgccgggacggccggcctgggcttcatcgtgccgctgggagtggcctacctgctggcgctgagctacgccttttccttttccgagctggccctgatgattccccgcgccggtagcctgagcagctacaccgaggtggccatcgggcatttcccggcgatcctggcgaccttttccggctacgtggtggtggcgatgttcgccctctcggcggaactgctgctgctcgacctgatcatcggcaaggtctaccccggcgcgctgccgccgatgctggtggcctacggcgtgctcggcctgttcaccctgctcaacctgctcggcatcgacatcttcgcgcgcctgcagagcgcgctggcgctgctgatgatgatcgtcctgctggtgctcggcctgggtgcggtgagcagcgaccacgcttccgcgcagaccgccctggcgagcggctggaacccgctgggggtaagcgccctggcgctcaccgcgatggccgtgtggggcttcgtcggcgccgagttcgtctgcccgctggtggaggagacgcggcgtccggagcgcaacatcccgcgttcgatgatcctcggcctgagcatcatcttcctgaccatcgccctctactgcttcggtgcgctgctgtgcatcccgcaggcggaactggccggcgacccgctgccacacttcctcttcgccaaccgcgtgttcggcgagtacggccagctgttcctggtgatcgccgcgatcaccgccacctgcagcaccctcaactcgtcgctggcggcgatcccgcggatgctctacgggatggcgcagaacggccaggccttcccgcaattcaagcagctcagccggcgggcgcgcacgccctgggtggcggtgctgttcgtcgccgcgatcaccggcctgccgatcctgatcctcggccaggacccggactcgatcaacctgctgctgctcgccgccgcgctggcctggctgctggcctacatcatcgcccacgtcgacgtgctggccctgcgccgtcgctatccgcacatcgcccgtccgtttcgcacgccgttctacccgctgccgcaactgttcggcatcgccgggatgatctacgcggtggtccacgtctcgccgaccccggaaatgaccggacggatcttcgccagcgccggcgtggtgctcggcgtggtctcgctggtggcggtggtgtggatcaagggcgtgatgcgcaagcccctcttcgtacccgaaccgctcgagacggccggtgagactgcccagggcaagtccgtcgccctcgatcccctgcaatccccttcggcctgacgcgccaagggaacaaggagaacacagacgatgaccgctcagctcaacccgcagcgcgacacccgcgactaccagcaactggacgccgcgcaccacatccacgccttcctcgaccagaaggcgctgaaccgcgaaggcccgcgggtgatggtccgcggcgatggcctgcagctctgggacaacgacggcaagcgctacctggacggcatgtccggcctctggtgtaccaacctcggctacggccgccaggacctcgccgccgccgccagccgccagctggaacaactgccgtactacaacatgttcttccacaccacccacccggcggtggtggagctttccgagatgctcttcagcctgctgccggaccactacagccacgcgatctacaccaactccggctccgaggccaacgaggtgctgatccgtaccgtgcggcgctactggcagatcctcggcaagccgcagaagaagatcatgatcggccgctggaacggctaccacggctcgaccctgggcagcaccgcgctcggcgggatgaagttcatgcacgagatgggcggcatgctgccggacttcgcccacatcgacgaaccctactggtacgccaacggcggcgagctgagcccggccgagttcggtcgccgcgcggcgctgcaactggaggagaagatcctcgaactgggcgcggagaacgtcgccgccttcgtcgccgagcccttccagggcgccggtggcatgatcttcccgccgcaaagctattggccggagatccagcgcatctgccggcagtacgacgtgctgctgtgcgccgacgaagtgatcggcggcttcggccgcaccggcgaatggttcgcccacgaacacttcggcttccagccggacaccttgtccatcgccaagggcctgacgtccggctacatccccatgggcggcctggtactcggcaagcgcatcgccgaggtgctggtggagcagggcggggtgttcgcccacggcctgacctattccggccacccggtggcggcggcggtggccatcgccaacctcaaggcgctgcgcgacgagggcgtggtcacgcgggtcagggaggagaccggcccctacctgcaacgctgcctgcgcgaggtcttcggcgaccatccgctggtcggcgaggtccagggcgccggcttcgtcgccgcgctgcagttcgccgaggacaaggtgacccgcaagcgcttcgccaacgagaacgatctggcctggcgctgccgcaccatcggcttcgaggagggcgtgatcatccgctccaccctcggccgcatgatcatggccccggcgctggtggccgggcgtgccgagatcgacgaactgatcgacaagacccgtatcgcggtggatcgcaccgcgcgcgagatcggcgtgctctgacgcgccccggcggcccggcctcggccgggtcgcctgcgacacggagcgtccccccataacgacgatgcggcgcctggcgaccgcgcgcggaaccgtttcggcctctggccggcaactgcctcagcaacatcacaacaatgccaatcggctgtgggagtgttccatgttcaagtccttgcaccagtacgcacacgtgttttcccggttgtccctgttcgtcctggcgttcgccgcggcggcccaggcgcagagccagagcctgacggtgatctccttcggcggcgcgaccaaggccgcccaggaacaggcctatttcaaacccttcgagcgaagcggcggcgggcaggtggtcgccggcgaatacaacggcgaaatggccaaggtgaaggccatggtcgacgtcggcaaggtcagctgggacgtggtcgaggtggagagccccgaactgctccgcggctgcgacgaggggctgttcgaacgcctcgacccggcgcgtttcggcgaccccgcgcagttcgtccccggcactttcagcgagtgcggggtggccacctacgtctggtcgatggtgatggcctacgactcgacgaagctggccagggcgccgcagtcctgggcggatttctggaacgtccgcgagttccccggcaagcgtggcctgcgcaagggcgccaagtacaccctggaagtggcgttgctggccgacggggtgaaggcggaggacctctacaaggtactcgccaccccggagggggtcagccgcgccttcgccaagctcgaccagctcaagccgaacatccagtggtgggaggccggcgcccagccgccgcaatggctggcggccggcgacgtggtgatgagcgcggcctacaacgggcgcatcgccgctgcgcagaaggagggggtgaaactggccatcgtctggcccggcagtctctacgatccggagtactgggcggtggtgaagggcacgccgaacaaggcgctggcggagaaattcatcgccttcgccagccagccgcagacgcagaaggtgttctccgagcagatcccctacgggccggtacacaagggcaccctggcgttgctgccgaagacggtgcaggaggcgctgccgaccgcgccggccaacctcgaaggcgcgcgggcggtggatgccgagttctgggtggaccacggcgaggagctggaacagcgtttcaatgcctgggcggcgcgctgagcgcgctgcgcgtcggcaaaaaaaatgacgggccccaagtcgtccgggcccgtcgggtcaaagcgctgacggggtgatcagcgcagctcttccaacaacccctgcagataccgacagccctcggtatccagcgcctgcaccggaaggcgcggcgcccccacctccaggccggagaggcccaggccggccttgatggtggtcggcaggccccggcggaggatgaagtcgagcagcggcaactgccggtagaacagcgcgcgggccttctccaggtcgccgtcgagcaccgcctggtagagctggccgttgagcgtcgggatcaggttcggcgcggcgctgcaccagcctttcgcgccggccacgaaggcctccagcgccagcgggttgcagccgttgtagaagggcacccggccttcgccgagcaggcgcagcttgtgcatgcgctggatgtcgccggtgctctccttgaccatggtcacgttgtccacttcgcggacgatgcgcaggatcagttccaccgacatgtcgatgccgctggtgcccgggttgttgtagagcatcaccggcacgccgatggcttcgcccaccgcgcggtagtgctggaacacttccgcctcgttgagcttccagtaggagatcggcaggaccatcaccgcctcggcgccgagggattcggcgaactgcgcgcggcgcacggtcttggcggtggtcaggtcggagacgctgacgatggtcggcacgcgatgggcgacggtcttcagggtgaagtcgaccacctcgtcccattccgggtcgctcaggtaggcgccttcgccggtgctgccgagcggggcgatggcgtgcacgccgccgtcgatcaggcgctcgatggagcggccgagggccggcaggtcgagaccgccgtcggcggcgaagggggtgatggtgtagccgatgatgccgtggatggatgcggacattggatgtacccgtgacattgagtgggaaatgccaggacggacctggtgggaaaggtcgttcagctcaggcagtcgctgttgcgcggcaggcagcgccgggcgtagtagttgaatgcggcgccgtggcgcttcggggtggagatccagtcgtgggcctcgcgcgccagggccggcgggatcggcttgatctctccggcggccatcgccagcaactgcatcttcgccgcgcgctcgagcagcaccgcgatcacgcaggcctcctcgatgctcgcaccggtggccagcaggccgtggtgggagagcaggatggcgcgcttgtcgccgagggcggcggagatgatctcgccttcctcgttgcctaccggcacgcccggccagtccttgaggaaggcgcagtcgtcgtatagcgggcaaaggtccatgtgcgagacctgcagcggtacttccagggtcgacagcgcggcgatgtgcagcgggtgggtgtggatgatgcagttgacgtccgggcgggcgcgatagacccagctgtggaagcgattggccggattcgccatgccgtgcccgtggaggacgttgaggtcttcgtcgaccagcagcaggttgccggcgctgatctcgtcgaagcccaggcccagttgctgggtgtagtaggtccccgcctccgggccgcgcgaggtgatctgcccggcgagcccggagtcgtggccggcctcgaagagaatccggcaggtcagggccagcttttgccggtcagtccacgtattatcgccgaggctgcttttcatctgcttcagcgcgtgctggatcagttgatccttgggtaattccagtgtcgtagccatgcgaggttcctttgacggagcgagtcgggggaaacgccaggcagttgcgcgccacgcaacgacccggctgtaaatgacacggatcaagttatatgacacaaagtgtcattagcaagagagaagtttcatcgccatcgggagaaggctgtcctcaatgtccatgcgcttgaaattgctgagaaaaaaactcggggtcacgctggagaccctggccgacaagaccggcctgaccaagagctacctgtccaaggtcgagcgcgggctgaacacgccgtccattgccgccgcgctgaagctggcgaaggcgttgaacgtgcaggtggaggagctgttctccgaggaaagcgacggtgtcgacggctacagcatcgttcgtcgcgaccagcgcaagtcgctgtccagcggcgacgacggcccggcctacgcctccctcgcgcagcagatcggcgcccgcgcgctgttgccgttcatcgtccaccccccgcgcgatttcagtcactcgacgttcaaggagcacctcggcgaagagttcatcttcgtccatgagggccaggtcgaggtcgacttcatgaaccagcggatcatcctcgagcgcggcgacgccctgcatttcaacgcacagaagccgcaccgcatccgctccctgggggagacccaggcggaattgctggtggtgatccacagcgacgaatgaggcgacggcttcggtcgatcggatgcttgctaacgttctgttcgattatcgaactgttaatcgattatcggattgtgagccctcggaccccggcgtaaggttctcgtcacgtgccgtccaggcagcgcacaacaagacgagacccgaccgatggctgaaatcctctccctgcgcgaagcggtgcgacgcttcgtccacgatggcgacagcgtcgccctcgaaggcttcactcacctgatcccgacggccgccggccacgagctgatccgccagggcaggaaagacctgacgctgatccgcatgactcccgacctggtctacgacctgctgatcggtgcaggctgcgcgaagaagctggtgttctcctggggcggcaaccccggtgtcggttcgctgcaccgcctgcgcgacgcggtggagaagggctggccgcaaccgctggagatcgaggaacacagccacgccgacctcgccaacgcctatgtcgccggcgcctccgggctgcccttcgcggtgctgcgcgcctacgccggctccgacctgccgaaggtcaacccgctgatccgcagcgtcacctgcccgttcaccggcgaagtgctggcggcggtgccctcggtgcgtccggacgtcagcgtgatccacgcgcagaaggccgaccgcaagggcaacgtgctgctctggggcatcctcggcgtgcagaaggaagcggccctggcggcgaagcgctgcatcgtcaccgtcgaggagatcgtcgacgaactggacgccccgatgaacgcctgcgtcctgccgagctgggcgctcagcgccgtgtgcctggtgcccggcggcgcgcatccgtcctatgcccacggctactacgagcgcgacaaccgcttctaccaggactgggacccgatcgcccgcgaccgcgaaagcttcaccgcgtggatcgacgaatacatccgggggaccgaggatttcggcgccttccaggccaagctcgcggagggcaagcgatgagcagctacagcaccaacgagatgatgaccgtggccgccgcccgccgcctgcacaacggcgcggtgtgcttcgtcggcatcggcctgccgtcgaaggccgccaacctggcgcgcctgacttcctcgccggacgtcgtgctgatctacgagtccgggccgatcggcgccaagcccagcgtcctgccgctgtccatcggcgacggcgagttggccgagaccgccgataccgtggtccccaccggcgagatcttccgctactggctgcagggcggacggatcgacgtcggcttcctcggcgcggcccaggtcgaccgcttcggcaacatcaacaccaccgtgatcggcgactaccgccagcccaaggtgcgcctgccgggagccggcggcgcgccggaaatcgccggcagcgccaaggaagtgctgatcatcctcaagcagtcgcaccgcaccttcgtcgacaagctggccttcgtcacctcggtcggccatggcgagggcggcgactcgcgccagcgcctgggcctgccgggcaaggggccggtggcgatcatcaccgacctgtgcatcatggagccggaagccggcagcaacgagttcgtggtcacttcgctgcatccgggcgtgacccgcgagcaggtggtcgaggccaccggctgggcgatccgcttcgccgagcgggtcgccgagacgcccgcgccgagcgaggtcgaactcgccgcgctgcgcgacctcgaggcgcgcaccgcggccgcccatggacagaaggggagcgacgaatgagccgcgaggtattcatctgcgatgccgtgcgcacgccgatcggccgtttcggcggcagtctttccgcggtgcgcgccgacgacctcgcggcggtgccgctgaaggccctggtcgagcgcaacccgggggtcgactggtcggcgttggacgaggtgttcctcggctgcgccaaccaggccggcgaggacaaccgtaacgtggcgcgcatggcgctgctgctggccggtttgccggagagcgtgcccggcgtcaccctcaaccgcctctgcgcctcggggatggacgccatcggcacggcgttccgcgccatcgcctgcggcgagatggagctggccatcgccggcggcgtcgagtcgatgtcgcgcgcgccgtacgtgatgggcaaggccgatagcgccttcgggcgcggccagaagatcgaggacaccaccatcggctggcgcttcgtcaatccgctgatgaaggagcagtacggcatcgacccgatgccgcagaccgccgacaacgtcgccgacgactatcgcgtgtcgcgtgccgaccaggatgccttcgccctgcgcagccagcagcgcgccggcagggcgcaggaggccggtttcttcgccgaggaaatcgtcccggtgacgattcgcgggcgcaagggcgacaccctggtcgagcacgacgagcatccgcgtcccgacaccaccctggaggcgctggcccggctcaagccggtcaacgggccggagaagaccgtcaccgccggcaacgcgtccggggtcaacgacggcgccgccgcgctggtcctggcctccgccgaggcagtggagaagcacggcctgactccgcgcgcgcgggtgctgggcatggccagcgccggcgtcgccccacggatcatgggcatcggcccggtgccggcggtgcgcaagctgctgcggcgcctggacctggcgatcgacgccttcgacgtgatcgaactcaacgaagccttcgccagccagggcctggcctgcctgcgcgaactgggcgtggccgacgacagtgagaaggtcaacccgaacggcggtgccatcgccctcggccacccgctggggatgagcggtgcgcggctggtcctcaccgcgctccatcaacttgagaagagcggcggccggcgcggcctggcgaccatgtgcgtaggcgtcggccaaggcctggcgctggccatcgagcgggtctgactggcacaaccgggtcgcccgcccggtatcaagagcgcgcgtcgcgcggcgctgcccatgtttcggcggcggcgcggcgcgtgtgcagcggaacaggacgctccgtcgcacggtcaggatgaaacggaccctgtcgagagaacaacagcatgactgcccctgttcaccagtacagcaacgaagaacgccgcaagcgcatcttcgccatcgtcggcgcctcctccggcaacctcgtggaatggttcgacttctacgtctacgccttctgcgcgatctacttcgcaccggccttcttcccctccgacaaccccacggtgcagttgctgaacaccgccggggtcttcgccgccggcttcctcatgcgccccatcggcggctggatgttcggccgcatcgccgacaagcacgggcgcaagaccgccatgctgatctcggtggtgatgatgtgcgccggctccctggcgatcgcctgcatgcccacctacgccagcatcggcaccctggcgccggcgctgctgttgctggcgcggatgttccagggcctgtcggtgggcggcgagtacggcaccagcgcgacctacatgagcgaggtggcgctcaagggccagcgcggcttcttcgcctcgttccagtacgtcaccctgatcggcggacagttgctggcggtgctggtggtggtgatcctgcagcagttgctgagcgaagacgaactgcgcgcctggggctggcggattcccttcgtgatcggcgcgatcaccgcggtgatcgccctctggctgcggcgctcgctgaacgagaccgcttcgaagtcgaccctggagcgcaaggaatccggcaccttcgccgagctgttcaagcacaagcgggccttcttcaccgtgctcggcttcaccgccggcggctcgctgatcttctacaccttcaccacctacatgcagaagtacctggtcaacaccgccgggatgagcgccaagaccgccagcgcggtgatgaccttcgccctgctggcgtacatgctgatgcaaccgctgttcggcatgctttccgatcgcatcgggcgcaagacctcgatgctctggttcggcaccctgggcacgctctgcaccctgccgatcctgctcgcgctgaagaccgtgagcagtccctacatggccttcttcctgatcatcctggcgctggccatcgtcagcctgtacacctccatcagcggcctgatcaaggccgagatgttcccgccggaggtgcgcgccctcggcgtcggagtgtcctacgcggtgggcaacgcgatcttcggcggctcggccgagtacgtcgccctggggctgaagtcggtagggatggagaacgtcttctactggtatgtttcagccatgtgcctgctggcgctgctggtctgcgtgagcctgccggacctgcgcaaggtcagctacctgaacgacgagccctgacgggccgggaaaaggaaaaccgatgagcgacgtacccgccaaccagttgttcgatgcctatttcacggcggcgccgatgcgcgcggtgttctccgaccgcggccgcctgcaaggcatgctcgacttcgaggccgccctggcccgcgccgaggcgcgcaccggggtggttcccgcgacggcggtggcgccgatcgaggcggcctgccgcgccgaactgtacgacccgctggcgctggccgaggcggtcgccactgccggcaactcggcgatcccgctggtcaaggcgctgggccgccaggtggcggctggcgacgccgaggccgagcgctacgtgcatctcggcgccaccagccaggacgccatggacagcggcctggtgctgcaactgcgccgtgcgctggccttgctcgagcaggatctgcaacgtcttgccgaggtcctggcggaccaggccgaacggcatgccgacacgccgctggccgggcgcacctggttgcagcacgccaccccggtgaccctgggcatgaagctcgccggcctgctcggtgccttgacccggcaccgccagcgcctgcgcgagttgcgcccgcgcctgctggtgctgcaattcggcggcgcctcggggacgctcgccgcgctcggcgaacaggccctgccggtggccgcggcgctggccgaggagctgggcctggctttgcccgaacaaccctggcacacccagcgcgaccgcctggtggaattcgccagcgtgctcggcctggtggccggtagcctcggcaagttcggtcgcgatgtcagcctgctgatgcagaccgaggccggcgaggtcttcgagccggccggcgccgggcgcggcggttcctcgaccatgccgcacaagcgcaacccggtgagcagcgcggtgctgatcgccgccgccacccgtgcgccggggctggtctcgaccctgttcgcggcgatgccgcaggaacacgagcgcagcctcggtctctggcacgccgagtgggaaaccctgccggaactctgttgcctggttgccggcgcgctgcaacaggcgatcggcctgctcgaaggcctggaggtggacgcccagcggatgcgccgcaaccttggcctgacccacggcctggtgctcgccgaggcggtgagcatcgccctggcccgccgtatcggccgcgaagccgcgcaccatctggtggaacagtgctgccgccgcgccgtcgagcagcgccgcgagttgcgcgcggtgctcggcgaagaggcgcgggtgagcgccgagttgtccggcgacgaactggaccgcctgctcgatcccgcccattacctcggccaggcccgcgcctgggtcgagcgcgcgctcgccgaacaccatgccctgggcttcgaaccccatcccgcctgactggagatcccttcgtgccaaccgtacgcctcgccgacggcgacctgaactactccctggaaggaccggccggcgcgccggtcctgctgttgtcaaactcgctgggcaccgacctgggcatgtgggacacgcagatccccgcactcaccgcccatttccgcgtgctgcgctacgacacccgcggccacggcgcctcgctggtcacccccggaccgtacgccatcggccagctcggcgccgacgtgcttgccctgctcgatgccctcgagctgccgcgcgtgcatttctgcgggctgtccatgggcggcctgatcggccagtggctgggcatccacgccggcgagcggctcggccggctggtgctgtgcaacaccgcggcgaagattgccagcgacgaggtctggaacacccgcatcgataccgtcctgaaaggcggcgagcaggccatgcgtgacctgcgcgacgcctcggtggcgcgctggttcaccgcgggcttcgccgagcgcgaaccggcgcaggtcgagcacatcgtcgcgatgctcgcggccacctcgccgcagggctacgcggccaactgcgctgcggtacgcgacgccgatttccgcgagcagctcgggctggtccaggcgccgacgctgatcgtcgccggcagccacgatgccgtgaccactccggacaacgcccgcttcatgcaggcgcgcatcgccgacgcgcagttggtcgagttcgccgccgcgcacctgtccaacgtcgaagcgggcgacgccttcagccgccgcctggtcgatttcctgctgtccgcctgaggagccgccgatggacgagaaacaacgctacgaagccggcatgcaagtgcgccgcgcggtgctcggcgacgcccatgtcgagcgcagcctggccaacctgacgccgttcaacgaagagttccaggaaatgatcacccgccacgcctggggcgacatatggacccgtccggggctgccgcgacacacccgcagcctggtcaccatcgccatgctgatcggcatgaaccgcaacgaggaactcaagctgcatctgcgcgcggcgaagaacaacggggtgagccgcgacgagatcaaggaagtgatcatgcagagcgccatctactgcggtattcccgcggccaacgcgaccttccacctggccgaatcggtgtgggacgagcttggcgtggagtcgcagcaggcgtcccggtaggtcgccggcggcgctagcggtagggcgaatggcgtcgcaggcgttatccgccgataccccgagggccaacggcggttatccgtcctgcgcgtgggtcggcaaggcggcgcttccccttgccaatcgccggcgtttcccggaaggtcgacagctccgtcatcccttcggtccgccatgagccgcaagctgcatatccacgcgcccgcgatccactacttcgacatggttcgccgctgccattcgatccgcgaagccgcgcggcgcctgaacgtcgcctcgtcggcggtgaaccggcagatcctcaagctggaggacgagatcggtgcgccgctgttcgaccgcctgcccggcggcctgcgcctgaccggagccggggagatcttcgcgcgccacgtcaccgtggtcctgcaggacatggagcgcgtgcgttccgaactggacgcgctgcaaggcctgcgcaccggccatgtggagatcgccaccatcgaagcggtgaccagcgacctgctgccctgcgtgctcaaggcgatgcgcgaacgctacccggacatcaccgtcggcgtcaccctgctcggttcccaggcgatacccgaggcggtgagcagtggcgcggtcgacctcggcctggccttcgccctgccgcgcagcgccgacctgcaacaggtcagcgtcggccatttccgcctcggtgccatcgtctccccgcagcacccgttggcgcgacaccaggccatcgccttcgccgattgcgtcgaacatggcctgatcatggccaagagcgagctgtccatccatcacctgctggcgccgctccagcgccgtttgcgcgaaccgcgccgggcggtgctggagagcagctccctggagctgtcgcgacaactggcgcggcgcgggctcggcgtcgccttccagacccgcctggggatcgaggccgacatcgcccagggcgagctgcgtttcctgccgctgaaagacaatggcggcatccacagcgacctcggcctctacgtgcgcaccggccgttacctgccggtggcggtggacgccctggcccggcagatcgccgaggaagtgcgcctgcgcgagcgcgaggaagcgcgcctgaacgaggcctgagcggcgctcgcgctgatgccagacggcttgcccgagcttgcccgtccgctgatgccgtttcggcatcggcatgttcgatattctgttctttggtcagcgcggcgaagtgccgatactgccccgcgaccccggcgcgaaaccgggggctgagtcgccacaagaacaacaagcaaccagcaggacacacagcatgaagaagatgatgcagggcgccgccgccctgatcgcgctcgtcggcgccggggagagcatggcgctggaatggatgagcaacagcgtcggtttccgttacggccagcaattcaccaacccgaacaacccggacaagttcgccaagcgcatctacagcttcacccacgccgacggctatcgctacggcagcaatttcttcaatctcgatgtgttcctttccgacaaccgcgacccgcgcaagggcaccgaccatggtggcagcgaagtctatgcggtctaccgccaccagctctacgcttcgcgggtgttcgaccggccgctgggcaccggcctggtcaaggactacgccttcaccctgggcttcgacgccagccgcaacaacaacctggcttcggccaagaagcgcgccctggtgttcggcccgaccctcaagttcaacggtcccggcgtgctcgacctgagcctgctctactaccgcgagaagaaccacttcggcgtgcccggcgcgcgccatcccgaccacaccttcgacaccacctacatgctcaacctgacctggatgcggccgttcaaggtcggcaaccatgcggcgaagttccagggcttcgtcaactacgtgggagagaagggcgaggactacaacgacaaggacaccgcggcggaaaccctggtccgcaccgccctgatggtcgccgccctgccaggcgacaagcgccagccgaacctgtggctcggcgtcggctacgagtattggcacaacaagttcggcgtcgacggtggcaccggcagccgcacctcgacgccgacgttgaatatggaattcaccttctgaagcgaagcgccgtcgccctacgcgatgccgccaaccctggggtggggcggataacgccaccggcgttatccgccgatacaccgaagcccgacggcggataaccgcaagcggttatgcgtcctacgcgatggggcagtttcaccccgcatccgcgtgactgaccaaccccttcagcagcaccgcggcggtggccagtgcagccggcagcaccagggcggtcagcacctgttcgaagttccagcccaggcccagcagggtggcgccgatccaggcgccgaggatggcgccgaagcggccgataccgagcatccaggagacccccgtggcccgcccctgggtcggatagaagcgcgccgccagcgacggcatcgccgactgcgcgccgttgatgcacatgccggccagcagcaccagggtcgccagcagggtgacctggccgaggctctggccgacgcaccaggcgaacacccccgccagcaggtagaacaggccgatcaccttgtgcgggttgaagcgatccatcgcccagcccaccgctacggcgctgagcaccccgccgaactggaacagcgcgccgatgaacgccgcctgctccaggctcgcgccgctatcgcgcatcagggtcggcagccagctggtgagcaggtagacgatcaccaggcccatgaagtaggtcagccagagcagcagggtgccggcgctgtaggtaccggaaaagatcaccgcgaacacgttgcgggcctgcaccgtctgctgctcggggacgtggaaactccgtgccagcgccacctgcgccggggcgatgggggccagcacctggcgtacccgctcgctgccgcggttgcgcaccaccaggtagcgcgccgattccggcaggcggaacagcaggactaccgccaggaccagcggtagcaggccgccgagcagcagcaggctgtgccagccgaacagcgggatcagcttcgccgagacgaatccgccgcaggccatgcccaggttgaagccacagaacatgctggtcaccagcagcgacttgaggcgctcgggggtgtattcggaaagcagggtggtggcgttgggcatcgccgcgccgaggccgaggccggtgaggaagcgcagcgccagcagttgctcgacgttggtgctgtaggccgaggccaggctgaacaggccgaagaggaagaccgccgcgaccaataccagcttgcgtccgtagcggtcggccagcggtccggagccgagggcgccgaagaccatgccgatcagcgcggcgctcatcaccggcccgaggctggcgcggtcgatgccccagtcctgggtcagcgccggagcgatgaagcccatcgcggcggtgtcgaggccatcgaggaagacgatcaggaagcacagcaggacgatccgccattggtacggcgaaagcggctgggcattgatgaaggcttgcacgtcgagtcgttcgacggcgggcaggctggggctgttcatgggacgggttccgcggcgagagtgagggcgtgggacgagggtcggacgcgtggctcaggtgcaggcggcggaaggcaaggcgtgctgcggcatgtcgggattcccctgttgtttttgtagcggaggcgctcggcctgccggggtgcagacacattacggagggccatggggagtggcaatccgataatcgtttatcggttcgctgatcgaacgaaaccctgtgaaatctcgaccttcgccaggctgtgaaaatccggaaccagattctagaatcctgcctttcctcgactcaggaacgcccctccatggccggtagcctcatcgaacgcgccctcggcttgctcgaactcctcgccagcgatgcccgtggcctgcccctgcaacaactggcggaccgcctggatatccccaagagcgccgcgcaccgcatgctcgccgagctgatccggctcggctacgtgcgccaggacgacgacaccagccgctaccgcctcagcacccgcctggccgcgctgggcttccgcttcctcgcttccagcggggtggtcgacctggtccagccggtgctcgacgggctcgcccgggagaccggcgaactggtgcgcctgggggtgatcgaaggcgatcgccagacctggatcgccaagtcccagggcgccacctccgggctacgctacgaccccgacatggggcgcgaggcgccgctgttctacaccgcatccgggcacgcctggctggccagcctgagcgacaaggcggcgctggcgctggtggagcgccagggcgtaggggcggcgcgggacttcggtcccaacgcgccgcgctccaggagcgagctgctgcgctacctgaagcgcgcccgcgagcacggctatgcctggcagatcgaatgctcggcgccgggcatggcggcgatggccgcactggtgcgccaccccgaggacggacgggctctcggcgtgctcagcgtggccgggccgagcgcacgcttcggcgaggcgcgcatgcacgaactggcgcccctgctcctggccgcggcgcaggacctgtcccacgccagccaggcgtccgagctgttccgctgagccatccggcccggccccagtcctttcccgacatcagcgttcgaatagcgaacgctttcttgcctgtcacgagcccgcatgcggcgggcctttccgcacttccatggatgcgccggcggtagtgccgtctcgaagcgctcttgcgcggggccagccattcgttcaaataatctccctcgctaaatctggaacgacgttctggaatcttgaagcgaacaagaaaacaacgattggggaccgccttggacgcaccgcttcgcatcgccctcatcggcgccggcaatatgggccgccagcattaccaccgcttgcagcgaatcgccggcgcgcgcctgtgtgcggtggccgatccgcagggccaggcgttcgccgcggacgccggcgtgccctggttcggcgatcatcggaggttgctggaagaagcccggccgcaagcggcgatcgtcgccaatccgaacaacctgcatgtcgccaccgccctcgactgcctcgccgccggggtgccgctgctgctggaaaaaccggtcggcgtgcagctcgacgaagtgagcgagctggtggccgtcgcccggcgatctggcgttccgctgctggtcggtcaccatcgtcggcacaatccgctggtcgtgcgggcgcgccaattgatcgccgagggcgcgctcggtcggttgctgtcggtcaccgcgctctggcagttgaagaagcccgacagttatttcgaggtggcctggcgtcgcgagcccggcgcgggaatgttgctgaccaacctgatccatgacctcgacctgctccgccacctgtgcggggaagtgcgggaggtgcaggcgctggccggcaacgctatccgtggcctgcccaacgaagacaacatcgcgctgctcctgcgcttcgccaatggcgccctgggcagcctgaccggttgcgacgctgcggcggcgccctggagctgggagctggcagccggggagaacccggtctatccgcgccaggccgagcaaccctgctacctgctggccggcaccgagggtgccctgagccttccccagctccgccgctggcgctacgccgaggcccggcagggctggcacgacccgctggcggccagcgtggaggccgtggcgacaggcgatcccctgcaacgccagctagagcacttcgtccgggtcgcgcggggcgaggaagcgccattgatggatgccaccgacgccgctcgcaccctggcgctggtcgaggcggttcgcgaggccgcgcgcagtggccgggcctgcgcgccggccagtttctgaaccgctgacgatgaggtagtgcatggaatcgaggattctttccctggcggcgctcaccgtgctcgagctgtcgcccccggacatggtcgaggctgccgcccgcgccggctacagtcatgtcggcctgcgcctggtgccggcaaccgtggaagagcaccactatccgctgctggccgatgccggcctgcgccggcggaccctggcgcggctgcgcgacagcggagtgcgcacgctggacgtggagatcctgcgcctgcgtccggacacccgcgtcggcgagttcgccgcggtgctggaggtcggcgccgagttcggcgcgcgctatgtgctggtggccggcaacgatgacgacgaacggcgcagcgcggacaatttcgccgcgttgtgcgacctggcgtggccgctcggcctcgacccgcacctggagttcatgccctggaccgggatccgcgacctgcggcaggccgggcgggtggtcgaggcggcggcgcgggacaacgccggcctgttgctggacgccttccatttcgaccgctcggccagcagcctggaagacctgcgggcgatcccgcctgcgcgcctgggctacgcgcaactctgcgatgtcgtcgggccgcgtccgacgtcgatggacgaaatccttcgccaggcccgcgaggaacggcgcttccctggcgatggcgggctcgatctgctggcgctgctgcgcgccttgccggagaacctgccgctgagcctggaggtgcccgcgctggatctgctcgcgcgcggcgtggatggcgcggagcgggcgcggctggcgatcgagcggacccgggcgctgctcgcccgcctgtagcgccaccgcgcaggcaggttgcccgtttgcataatggaacggggttctatagtttccaaacgttgaagccgatcgtttctttcctcgatggcgggtaccgtcagaataaatagcctgctatcgatttgccctggtgcccggaccctccgatgaacgcatccacctccccgctgcccgccagcgaccagaccctgcgcggcatcctgctgatctgtgccgcggtgttcctgttcgccagccacgacgggttgtccaagttcctttccggtttctacccgatcgtcatggtggtctgggcccgctacctggtgcacaccctgttgatggtcgccgtgttcgtgccgcgcaacggcctcgcggtgatccgcagccgccgtccgctcatgcagttggcgcgggcgctgtgcctgatcggcaccagcctgttcttcaccaccggcctgcgctacctgcccttggccgaggcgaccgcggtgaacttcctggcaccgctgctggtgaccgcgttatccgtgccgctgctgaaggagaaggtcagcctcggccaatggctggcggtgctcaccggcttcatcggcgtgctcttcatcgtgcgtcccggtggcgcgctgttcaccccggcggcgttgttcccgctcggctcggcgctgtgcttcgggctctaccaactgctcacgcggatgctcgccaacagcgacagcccgaccaccagcaacttcctcgccggcatcttcaacacgctcatcatgagcctgctggtgccgttcttctggcagactccaagtcttctccacggcctgatgatgatcgccctgggcggttgcggcatgggcggccacctgctgctgacccaggccttccgccatgcgccgccggcgaccctggcgccgttcagctatggccagatcatcttcgccggcctgctcggcctgctggtgttcggccacgtgccggatgcctgggcgctgctcggcatcctcgtcatctgcgccagcggcctggtggtcgcctggcgccgtggccgctgaacgcaacggggtcggcgcataggcttcacaacaggctcagcggatagctgacgatcagccggttctcgtcgaagcgggtattgctgccccagtcgcggcgctggctggagttgcgccagcggacgttgagacgcttgaaggcgccgctctgcagcgtgtagcccagctcgctctcgcgtccccattcgctgccgtcgtcggtgactccggccaggcgcacatggtcgccatgcaggtagcgggtcatgaaggtcaggccgggtaggccgaggccaacgaagtcgaagtcgtagcgcagttgccaggagcgctcgccgggattgtcgtagctggcgttgtagctgtcgttggccagggttccgccgctggtgccgttgacccgcatccagccgtcgtcgccactgaccttctgcaggccgagatagagggtatgcagcccgtagcgcgcggagaacagcgcggaaacggtgcggttatcgagcttgccggcgcgcgcgctgccagcgtcgcggccacggaatccgccgaggttggcgcccagcagccagtcgccgagcggctggctgtgttgcagttgcaggtactgttggcggtagatgtccttcagctcggcgttccacaggccgagcaggctgcgttcgccattgaagcgatattcgccgccggcgaaatcgaagcggtcggaagtggcggctggccggccgaacagcgacatgtcctgcatgcttgcgtcgttgcgcgggctgttgccgcggaactggccggcgtagagggtcaggccggcgatctcgttggcgctgagctggccgccgcggaaggtctgcggcagcgagcggccatcgtcggagcggaggatcggcagcaccggcatccattcgccgatcttcagttcgctgttcgagacgcgcagcttgccggccaccgccaggcgtccgaagtcgtcggccgggcggccgtcgtcgtggatcggcagcagttgggtgccggccgttcccttgccgccatccagcttcaggctgtagagaccgaggacatcgaggccgaagccgacgctgccctgggtgaagccggagcgggcgtcgaggatgaagctctgcgtccactcctcggccttgccctggctggcatcgccgacgaagttgcggtgcaggtggaaattgcgcgcggtgaggctggccttggcatcttcgaggaaaccttgcccggcatggactggcaggccggcgcccaggcagagggaagcgcagagcgcgcggacgtggctcgggtgcgacatgggtgtgtcccttcgttcttgttctctaggcagggaggtgcccggcgagcgccgggcgcttggactcaggcttcgatccggcgcggagccatgaagtacagccaggtcagggcgatgaagtacatcgccgggatcatggtgaagagcaccgcgtagttgttgttcgtcgcggtcagtacgccgccgacgatctgggtcatgaacatcccgcccagcgccgcgcacatgccgccgaagccgaacaccgtgctcatcaggtgcttgggcgtgtagtccatcaccaggctccagatgttcgccgtccacgcctggtgcgcgccgaccgccagggcgatggccagcacggcgatccacaggccgctggcgttggcggcgaacaccacgccgacgatggtgcaggcgaacagcagcatcgacagcaggcgcgcgcggatcgccggcatgccgcggccgatcagccaggacgaaaggatgccgccgccgacgctgccgaagtcggcggtcaaccagatcaggatcagcgggatgcccatctgcgtcacgctgatgcccaggccgtactgctggttgaggaacggcggcagccagtagaggtagaaccagaacaccggcgcggtgatcgagtaggccagggcgaaggcccaggtgccgcggcggcggagaatctgcgagaagggcacgcgggtggcgggcggctcctgctgctggatgtattccagctcgctctgcttcacccgcggatgctcctcggggttgtagtagttgcgccaccagaacaccagccagaccaggcccagcgccgacatgcagaggaacgccgcctgccagccccagacgccgaggatcagcggcaacagggccggggtgaccatcgcgccgacattggtgccggcgttgaagatgccggtggccaccgcccgttccccggcggggaaccacaggcgggtggtcttcacgcaggccgggtagttggccgcctcggtcaggccgaggatgaagcgacagaccatgaagcccgccgccgaggtcgccaggccgtgggcgccggtggccaggctccagagcaacacggcgaggaagaacgcgcgcttgaccccgaccttgtcgatgaagcggccctggaggatgaagccgatggcgtagccgacctggaaccagaagttgatgttggcgtagtccatcgccgtccagctcatcttctcggccaggatcggctgcatcacgccgagggcggcgcgatcgatgtagttcagggtggtggcgaagaacaccagggcgagcatgccccagcgcgtccggccgacggcgaaggcgttgcggatcctgccgccgcgggattcccgcggggcgtcggcggcgagcagtcgagagctggaagagtggatcattgacggggccatcctttcggcggccggcgcctgggcgcccggcctggatttgtcgttctgggttgcacgcgggcgggccaggggccgcgccggtgtcagcgggccaggggcggtcgggccggacgagcggccagcggacgggatggagggcggacggagaggtcggcgatggacatgagcgggtacccgattcttgaaattgttatgtcgcgtgggttgcgcaggtgcccggaaagaagcgcggagcgcttccggcagatcgggacggcctgcacgggtggcagcgatggtgcgcgattggtcgaaaaagcgtcaattcgataatcgtgcttccgttcgatattcgaacggaatactaaccagttcgtacattttgcgttgcccggcagttggcgcaaaccaataatcggcttgccgggcgagcggtctcagcgacccgaagtggcttcccggcgcatcccgcgcgggctatccgcgcctccgccgttccgccgccggccctcgcgcggcgccaggcgccgtagggcgcattgaggagtcgaagcatgcagcgttcgatcgccaccgtatccctgagcggcaccctgccggaaaagctcgaggccatcgccgccgccggtttcgacggggtggaaatcttcgagaacgacctgcttcattacgacggcagcccgcgcgacgtacgccggctgtgtgccgacctgggcctggagatcctgctgttccagccgttccgcgacttcgagggctgccgccgggaacgcctggggcgaaacctggagcgcgccgaacgcaagttcgacctgatgcaggaactcggcaccgacctggtgctggtgtgcagcaacgtcgctgccgatgccctcggcgaaccggcgctgctggccgatgacctccggcagttggccgagcgcgccgccgtccgcggcctgcgcatcggctacgaggcgctggcctgggggcgccaggtgaacacctgggagcaggcctgggacctggtgcggcgggccgaccaggcgaacctcgggctgatcctcgacagcttccacaccctctcgctggacggcgatccccgcggcatcgccgatcttccgggggaaaagatcttcttcgtgcagatggccgacgcgcccttgctggcaatggacgtgctggaatggagccggcacttccgctgcttcccgggtcagggcggcttcgacctggcaggcttcctcgcgccggtcgtcgcgtccggctatcgcggtccgctgtcgctggaggtcttcaacgacggcttccgcgccgcgccgacccgcgccaacgccgtcgacggcctgcgctcgctgctctacctcgaggagaagacccgcgagcgcctgcaacgccagacgccgcacgtggcggtggacgagctgttcgcgccgccgccggcgagcctctgcgacggcatcgagttcctcgagttcgccgtcgacgagacgctcggcgcgcgccttggccagtggttgcaacgactgggcttcgccagggccggcgagcaccgttcgaagaatgtcagcctgttgcgccagggcgacatcaacctggtactgaacgccgagccctattccttcgcccacggtttcttcgaggcccacggaccgtccttgtgcgccaccgcgctgcgcgtgcgtgacgccggccaggcgctggagcgcgctcgtgcgtacggaggccagccgtaccgcggactgctcggccccaacgagcgggaaatcccggcggtgcgcgccctcgacggcagcctgctgtatctggtcgagcggcacaccgagggccgcagcatctacgacagcgacttcttgacgaacgacgccgacacctccggcctcggcctgcggcgcgtcgaccacgtggccctggcgctgcccgccgaaggcctggacagctgggtgctgttctacaagagcctgttcgacttcggcgccgatgacgaggtggtgctgcccgacccctatggcctggtcaccagtcgcgccgtgcgtagcccctgcggcagcgtgcgcctgccgctgaacatttccgaggaccgcaacaccgccatcgcccgttcgctgtccagctatcgcggttccggcgtgcaccacatcgccttcgattgcgccgacatcttcgctgccgtggcccaggccaaggaggccggggtcgcactgctggaaatcccgctgaactattacgacgacctcgccgcgcgcttcgacttcgacgacgagttcctcagcgaactggcctactacaacgtcctctacgaccgcgacgcccagggcggcgagctgttccatgtgttcaccgagccgttcgaggagcgcttcttcttcgagatcctccagcgccgccacggctacgccggctacggcgcggccaacgtgccggtgcgcctggcggcgatggcgcaagcgcggcggggtgtgcgccgggtcaagctgtgagaattgtcggggctccggcaggtgctcttcctacagccgggcgggccccgcataatcggccgcaattcccgccggccacgagtgagtcaccgatgtccaagcctgatcccgccgtcgtggaggaatccgctccgcgcggcaagggacgcaagaacaatcccgagaagacccgccaggacatcctccgcgccgccatcgacgagttcgtcgcccagggcctctcgggtgcgcgggtggacgccatcgccgagcgcacgcatacctcgaagcggatgatctattactacttcggcagcaaggagcagctctaccaggccgtgctggagaagctctacagcgacatccgcggtatcgagggcaccctgcggctgggcgcgctgccgccggccaaggcgatggagaagctggtggagttcagcttcgactaccacgaccggcatgtggatttcgtgcgcatcatcagcatcgagaacatccacaagggcgagcacatcgccagcagcgaactggtgcagagcgtcaacagctcgatcgtccagagcatcgccgagattctccgccgcggcgaagcggaaggggtgttccgcgccgggctggaggcgctcgacgtgcacatgctgatcagttcgttctgcttctaccgggtgtccaatcgctacaccgtgtcgcggatctttcgcaccgacctgcacgacgccgaggttcgccagcggcaccggcggatgattggcgaggcggtattgcgctacatccgtgcctgactccggtcccctctccccttggcgggagaggggcgccattcagtcgcccaggctggcgaagtgcgcctgcatgcgcgcggcgtcggccgccaccccgctgaacagttcgaatgccttcaccgcctggaacaccgccatggtgccgccgtccagtgtgcggcagccgagggcgcgggcctggcgcagcagctcggtttccagcggaaagtagatcacctcggcgacccacaggtcggcgcgcaacagttccgccggcaccggcatgccgggtagcttggccatgcccaccggggtggtgttgaccaatccctgggcatcgcccagggcgccggccaggtcgctgccggcgagcgctcgtggcgcgccgaagtgctggttgaggttgtccgcgagggcctgggcccgcgccgggtcgacgtcgaacaggaccagccgctcgacgccctcggcgagcagcgcaagggccactgccgcgccggcgccgcccgcgcccatctgcaccacgcgctggcgcggcgcgtcggccaggccgcgccgaaagccctcggcgaagcccaggcagtcggtgttgtggccgatgcgccggccatcgcgcagcaccacggtgttcaccgcgccgatgccgcgtgcctcggcggagaggtcgtcgagcagggggatgatcgcctgcttgcaggggaaggtgacgttcagcccggtgaagccgaggtcgctggcggcggcgagcaggaactccaggtcgtccgccgacttgcccagcgggtcgagatcgatcagccggtacagatagcggatgccctgggcgtcgccctcgcgctcgtgcagggcaggggtccgcgacgcctggatgccggcaccgatcaggccggcgagaaccgatcgcggcgcgctcatgcggccgcctcgaaacgctcggcgaaatgttccagggccaggcggtagccgaggctgccgaatccgcagatcactcccagcgccaccggcgagacgtaggagtggtggcggaacgcttcgcgctggtggacgttggacaggtgcacttcgaccaccggcagttccaccgcggccagggcgtcgcgcagcgccaccgaggtgtgggtccaggcggcggggttgatgacgatgccggcgacccggccgcgggcctggtggatccagtcgagcagttggccttcctggttggtctggcggaagtccacggcgaagccgcgcgtctcggcgaaggccgcgcattcgtcggcgatttcgcccagggtccgccggccgtaggtctgtggctcgcgggtgccgagcagattcaggttggggccgttcaggaccagtaccgtgcgcgtcatggcgcagcctccacagcaatgatgtcatcgatgccgggaaaatgtaccgaacggttacttttgtaaaccggacgccgtcgccgacgggacgaaagcgttcgattatcggcgtccgctcactcgcctgccgtcggttgcgtcgcgccgcggccgcgcagggtcatgtcgggcagtgccgaggccaccgccaggccgagcagcgccaccgccgcgttgaccaggaagagcaccttgaaggcatccgcgaggacatgctggaggatcacccgggccggcccgctggcggcgtccaggctgctcagcagggcgctctcggaaaagccctggtcgagcccgccgccgatccgcaggtgcttgagcagggccagcaggatcgccgacatcagcgccaccccgaccgccccgccgagggagcggaacaacgtcgcgttgctggtggcgacgccgatgtggcgttgctccacggcgttctgcgcggccaccaggctggtcgggaactgggtaccgatggcgatcccggtgagcagcatgcacagcccggacagccagtggtcgccgaccgggaccagggccaggccggcgatgccgcagggcaacaggacggcgccgagcaggatcagcggcttgtagcgtcccaggctggcggtcagccgcccgcagcagtacgcgcccagcggcaggcccatgaccagcggcagcagatgcagcgcggcgctgtcggcgccggcgccggtaacgctctggtagcgcagcggtaccagcacggtcagcgagatggcctggaagctggcgaagaacgcaaccagccaactgagggtggcggcgcggacggcgaacagttgcatcggcaccagcggttcgcggaagcgccgctcctgggcgacgaacagcagcagggcgagcgccgccagggcgaacaggccgagcagcgcagggtcgctccaggctgcgccctggccgatctgggtgatggccaggagcagcgcggtgaggcccaccaccatcagcacgatgcccaggtagtcgatcaccggttgccggcgcggcaccggcaggccgaccagggttcgccgcgagatggccagcgcgagaaggccgatcggcaggttgatccagaatacccagcgccacgacaggtactcggtgagcaggcccccgagcaccgggccggcgacgctggcgatggcgtacatgctgctgaagtaaccctggtagcggccgcgctcgcgcggcgggacgatgtcgccgatgatcgcctggctcaccgccatcagcccgcccgcgccgatcccctgcagcactcgcgccagcaccagttggcccatgctctgcgcgagcccgcaaagcagcgaggcggcggtgaacacgacgatggcgaagagcatcagacggcggcggccgtagaggtcgccgagcttgccgtagatcggcatcgatacggtcatcgccaccatgtaggccgagatcacccaggccagcaggtcgaggtcggcgaagtcggccgagatcgccggcagggagacggcgacgatggtctggtcgagggcgctgaggaagatcgacagcatcaggccggcgaggacggtacggacggcgggcgggttctgggcgagatcggacaagacggcacctggggcggacggaacgcgaaggcagcgggcatcatactgcgcctggggtcggacaggtgccgcggagaatcgatccgtgggccgtctttcgtcgatattcgcctgcgccaacgttgcgtcccgccttgggaaaggtgccccggcgttgcgccggggtggcgcggcctactcgatttcctcgtagggcaggccgacatagttctcggcgatggtcgccaggcccgcctcggagcccaggtagtactccagttcggtctgctggatgcgctggctgaacgcgtcggtgtcggggaagcgatgcagcaccgaagtcatccaccaggagaagcgttcggccttccagatccgccgcaggcagattgccgagtagcgttccagcagttcgccgcgcccttcgcggtaggccttcagcagcagccggtagagcgtgctgacgtcgctggcggccaggttcagtcccttggcgccggtgggcggcacgatgtgcgcggcgtcgccggcgaggaacagccggccatgctgcatcggctcgaccacgaagctgcgcagcggcgcgatgctcttctccagcgaaggtccggtcaccagtttctccgccacctcggacgggagtcgcgccttcagttccgtccagaagcgctcgtcggaccagtcctcgaccttctccgacaatggcacctgcacgtagtagcggctgcgggtggccgaacgctggctgcacagggcgaagccgcgcggatggttggcgtagatcagttcgtggctgaccggcggggtgtcggcgagcaggccgagccagccgaacggatagacccgctcgaagaccttcagccgctccgccgggatcgattgccgcgagatgccgtggaagccatcgcagccggcgatgtagtcgcaatccaggcgcagccgttcgccgtcgcgttcgaaggtcacgtaggggcgctcaccttgcaggtcgtgcaggcgcacctcggcggcctggtagacggtagtggcgccgcaggcttcgcgggcctccatgaggtcgcgggtgacctcggtctggccgtagaccatcaccgtcttgccgccgctcaggcgcttcaggtcgatgcgccggcgctgcccggcgaaggcgatctccacgccttcgtggaccagcccgtcgcgcgccatgcgccggtcgacgccggcctcgcgcagcaggtcgaccataccctgttccagcacgccggcgcggatgcggccgagcacgtagtccggggtctggcgttcgaggatcacgttgtcgatgccggccttgtgcagcaactggccgagcaggaggccggacggaccggcgccgatgatggcgacttgagtcttcattgcggatagccctctcgctgttatggctggccggcggcgcatgcgccggcgctgatcttgtctggaggtggctgtatttttgtttgccgtggagtgctatagaaggcaaattgccgatctatttctggacttttataaagtctgttcggcaatcggccatttcgctcggagggctcgatgacggattccatccgcgacgtcccggtgttcaagctctacggcgctcccctcgaatggccgaccccggacctgctgcactgcgagtcgatccccgcccgcagtcgtctgcacgactgggagatcaagccgcaccggcacgccgatctcgctcagttgctctacgtgcgcaagggctgggcgcagctccaggtcgagggcgagccgactcgcgtcgagcagccttccatccagttcgtaccgccgttgtgcatccatggcttccagttctccgagcgcatcgacggctacgtgctgacgctcgccgcaccgttgctggcgcgcttgcaggcgcacctcggcgcgcagcgccaggcgctggaggcgccggggttgtacccggtgggcgcggaccggcgctatatcgacacgctgttcgacgccatagacggcgagtacgccggcgctgcgccggcgcgcgagctgttgttgcagtcgctgatcggcgtgctggcggtgtggctggggcggcaggtgatggtccggcgggcggaggcccggccgggtcgcggtcaggaatacctatcggccttttcgcaactggtcgagcggcatttccgcgagcacctgggaatcgacgagtacgcgcgtcgcctgggcatctccccggcacacctgaacggcgtggcgcgccgcctcagcgggcagaccgcactgggcatcgtgcaccagcgcctgctgctggaggccaagcgcgacctggtctacacggcgatgacggtgaacgagatcgccgaccgcctcggcttcagcgagccggcctacttcacccgtttcttcaagcgcctgagcggcgtctcgccgagcgttttccgcaagggcgactagtgttcgcggcgcaactggacgatctccagcgcgcgcccctcgtcgtcgcgcgggcgtcggccgctctcgacgaagccgcagcgcgcgtagaaccccagcgcctcgcggttggcggcgtagacctcgacctccagcgcgcccttcagggttgccgcgtgctccaccagttgccggccgatcccgcgcccgtgggccgtcggggcgacgaacaggccgccgatgaaggcatcgagcaggccgatgaagcccagcggcgtatcgccgtccagcgccagccaggtttccgaggcatccagataatgatcgcgaaccagtgccttctgcttctgcaactcggcttcgccgaggaaaccgtggccgacgcgcgaggcctccagccagatggcgagggtggcatcgcggtcggcgggaatgtagcggcggatcttcggcggagaggacatggcggcggctcgcaacggcaacagccgcggattatcgcgtgagccggcgggaaaagggcagggccggcacgcccgcttcagtcgccgcggatgtactgttccagttgctggatcagctcggcctgctcggcgatcgccgccttgaccaggtcgccgatggacagcaggccgagcaactggccgtcttccacgaccggcaggtggcgcaggtggcgatcggtcatcaggttcatgcaggtgtcgacgctctgcttcgagtccacgctgaccaccggcgcgctcatgatcgcgctgatcggcgtaccgatggacgaacggcccttgaggaccatcttgcgcgcatagtcgcgctcgctgaccacccctaccacctcgccatggttcaccaccagcagcgcgccgatgttcttttccgccatcaggcgcagggcgtcgagcaccatctcgtccgctccgatggtgtacacctgctggttctgcttggcgttcaacagttgtgccacggttttcatacgcgcccctccggagccgttctcacgtccagcaagaatcgtagacggcgagcggatcggcaagcggggaaaacggcatcgaaccgattgaaaaacgtcatcatcgctttcccgacgaaggtagggcccgcgctattagtctttccctgcggggctagtgcagcacccgtgcgagcccttccggcgactggccggtgacgtagcaatggcggtgccggtcgaggctgagcgggtggccggcgtcggtcagcagcctggcgatgccctcgaggtgttccttgacgttcacctggtattcctgctcggtcaacggcacgacccacagcaggtcgaccggatgcgccgacagggcgaagccgtcgaacagggaggcatcctcctccagcggcgccgggaggagaaggaagtgccgcagcaggctctgctcgtagagcgggaagccgaacgccaccgcatgtccatgtcccagggcgaggcgctcgtggaatggcaggccggcgagccattgcaggtggcgcaggtcatcgccgcccagttcgtcgagatagcagatcagctcggcggaccagcgcgccttgcccatgtagggcgcgaaatgcatcggtgcctggctcatcccggcggtgatcaccacatggtgcggccgccgggtgctttccaggcgataagcgaagaccgccatttccggcgccgctacgcagtgtctccagaagtcccggcaatccagggtcatggcgggcgcacaaccgaaatgggcgtcgtatttctcgcgcagccgggcgatgtagtcgttcatcttcggtcctctggacttagcgggtggggccggacatggggcgccgggggcgcggccgtttccatgcgagggcagaccagtgatggctgatcctggttgccgttgggtgaccaatggaatgcgaacggcgactgccgagaaatcggctcgttccgagagaggcgagaggctttccttcttggtgcgtaggaaagcgctgagggcagctgagggtatctgtcgggaacggaaaaaagcccgtcgggaacgggcgaagagggaagcttaccagggcagcgggaagtggccttccgcgcgcaggtagtcaggatcgggggtgaacgggtcgatcttctgccgctcgctgcaaccctggcgttcgcagtcccgcaggcgctgcaacggcgagcggtcgtcgcgctggatgcggatgcctgtgacaggcgcgccttcggaaaggctgtagctgcggccgctctcgcaaccgggcagggtcaggcaaaggcagaggagcagggtggtgtgcgggtgtcgtggcattgcaggtcgaatgggcttgcgaaggccgcccatgctatcaatcggccagcaaatagggggccggatggacagtccatgaccgggatgagagttgcttcgcaaacccggagatgccctcgaaaggctattgcctcacgcgggaaagcccgtcgaaggcccgcagcaacttgcccaggacgagggtcagcgcctcttcttccgggccggcgccgagagccgccagcagcctttcgtcgagccctgcgacctgtgccagggcctgctcgaacaccgcctgtgccgcggggctgcggcgcaccagcacggcgcgcccgtcgtccggatccggcaggcggctgacccagccgcgccgcaccagccgttcgatggtccggcccagcgcggtgcggtcggtctgtgagtgctcgatgagcacgctcatcggcacgtcaccgtcgaaggcgtggatgatccgcaacgcacgccattcatgcagccccagttcgagaggggcaagcagggcggtgagttgccgttcgcgctggcggacgatctccgtcatcaggtacagcgggccttggggcagccccagtgcgttcgtctcggtcattggcccggtcaccttcctcgatcctctttcgccagggcggggattgtagcgctcaggcgtcggcgaatccgtagtcgctccagcgttcttcgactcgcctgcgcagcgccgtcggataggcgtggcggaacgacgccgtagcggcacgcatttgcccggcgaactgttccgggtacaggcagttgatcaccagccgaccgccgctgcctcgtgccttgtcctcggcatcgaggtagggaaccatcgggaagtcacggatcttcgggaaggcgaaatggtcgtgcagcggatgcgcgcgggtcgccagcgcccataccacctggtcgatctcggtgacgtcgatgtcgttgccgaccaggatcagcttcggcaccaggtgtccggcatgcgagccgaagacggtctcggcgacccgtgcggcgaaggccgcggcgtcggtgcccagggccgccaggcgctgtacgtcgatcgacagcacggcccagcaggtcgccgcctcgtaggagcaccagaccatgtccaccggcagtccggcgttctgcgccacgtccagcagttgcgcggaaatcatggtgccccagatggtgtggttttcctccggtggcgtgccggcgacgcagatcggcaggatcggctggtcgcggaagctcagcgcatggacgtggaacaatggctgcggcttgccggtggggaaggaatagccgtggtattcgcccatcgggccttccagcgcggtttcgtcgaggctgatctcgccctccaggacgatctcggcattggccggaacccacaggccgttggtctgcgtgcgcaccacctccaccggttcgccgaccagggcgcctacgtagccggcttcgctgaccccctccggcaacggcatgccggccgccgcgagtgccgccggcggtgcgccgagggccatcgcccagggcgtcggcttgcccaggcggcgccattgctcgcggatgatgccgatgtgctgggtgggaatggtcgggcccgccagggtgttgcggtccaccagcatcagccggcccaccgaccagctgtcccaactgccgtccggcgtctgtaccacgtggaaaccgtaggtgccgaaatagcggccgccgtcctgctcatggagcaaggggaccgggaagcgggtcaggtccacctgctcgccgagccagacgttttcctgcaccggcccgcactccagccggcgcggcgcgatcggttccgcgcgcatcgcggcgcgcagcgcggccacgatgtcccgcggcccgctgtgttccggcaggccgaaatgcagcgccaggcgcgaatgggcgcgggtcctgtcggcgcgcaggccggccggcgcgcccagtacccgcgcgccgggcaggctgtcgcggatgttgtggaacagcggggcgggtgcgcggcgttcgtagacccggcgggtgatggcgccgatctccaggttggcgtcgacctcggtgtgcacgtccaccaggtcgccctggcgacgcaggtggtcgacgaagtggcggaaatccagggcgctgcggttcatcggctcgccactccatataagtgcgtgtgcatgcatcttatgtgctggcgcgttctttagacaagcggagcccggtcggttcgcgggctggccggaaggtcgccacctaggcaagatatatggttggttggaagccctggcaagcttccttgcgcagtcgcggcacaggatcggcaagcgccgtcgtggaggaaacatggaagcgtgcgatacagcgggcattatggatgcgatcacggctgtcaccggcgtactcacccttctggtggcgtgggcagcattgttttcgtggcgccggcaagagcgtcagaaagcgatattggcgtggaaggcctatctggtggactacgcctacgggtttcccaatctgccggtgatatggggttaccagacgcacaaggacgagatcgaccaggccgcagagcgtttttatcggtgcgtgaaaagctacatggtcatgcgcgagctggtgtcgcggaagcggatgaaagcctatgagcgaatctggcgccaggctcatttcgttcatgagaaatgtacattcgaagggcaaatgacctgcgccatcgcccgggatctgctttcccaggcttacctgaacgattttctgaaatcttgatgggacagctcccggccgctcaacgcaccatatagtccatctgccatggccgcggaatcaccagtgccagcaacgcgagaagagccgccagcgctgcgctcgccgccatcgccgcgaggcccagttgctgttccagtagggcgccgagcaccgcgccgacgcacatgccgctccagggcaccagttgcacccgccagccgttgcgccgctcgcccagcagccagcggccgaggccgcggccgaagcgggagagggcgccggtgacgtaggtcaggccgatgggcaggccgttgacctgctcgaccacggcgttgagcatgcccatggcgaggatcgcggcgaccagcgccggcacgttccagtcgaatggccagaccgccgacaacgccagcagcatcgcgcagcagaccaggatcggcgccgcccggcgcccgctgaagcgcgccagtatcactcccagcgcgttgccgacgacgaaactggccagggcgacgctcagccgcaccagcccgccgaagtcgccctcgcccagcgataccgccaggcgcgtggtgttgccgctcatgaaggaaacgaagtcgccggtggcgaggaaaccgatggcgtcggtcatgcctgccagtaccgacagcccggccaccaggccgagcccgacacgcccgcgcgtccgccgcaaacgaaggcgccgcgcgctgctacccaccatgctgtctggaagcatccggagaaaccacccgcaggaagagaaggtccgccccagtgcggactcccgatcttaaggctctccccagggaaaaggccaggggcgaggcggagcgtctggggccgaagatcctggtcaatcggcaatgacagtgcggggcggggcctcagatatcgaataccggtacctggtttccacccagtacctcgatcttgtcggtccggtagaccaccatcgccttgctgcaggtcaccgtggaacgaccctctttgctggcattgagatacaccgtgcccttgccggcgtagaccgctctcgcgttggcggcgatgcgcagctcgagggccgccgcttctccgtcctcgtccccggcgaagtcgcacccgtagagggcgatggccagttccttgccgaacagttcgagaagggtcgcaccaaaggcctggggctcgacgaactgcttgccctggacacgccgggccatgacgtccgcggtgctctcgccgtgggggttgcccagccagagttggccagccgtgccgtgggtggcgatgaggatcgtatcgatgaagtactgttcgccgctctccgcggcaaccttgcctagatcccgaaccaactgggcgtagttggtatcggccttgatcgcgaaggccggcttgtagagcttgttccgcgcataggcgacgaccgcctccgcgaaggcgctaccggagtcgcctctccggatctcctgctggaagtcgtggtagatgaccaggaccgcccctttcctgaccgggccgctgagccctcccttgacgatgtcgagggcgaaacggaaattggcgctgagcacctgggacgcatgggtaggaaaggtatccgtatcggtcagcagttctacttcggtaccgaccagcacctcctttcgttcgtcgccctccgcccagggcgtgtcgtccacatccgttccgtagatccttgcgtccaggtcgacctcgacgagcgtactcactgtgaagggcaccagaagctcttccgggccgagtcgattcttgaccacggcgcccttgccttgcttggcgattttcgtgactacgccatgccatgagcgcatcctgttgctcctgtgggagtcctggtaggaacggcatccgagcatgcagaactatagacgtgaaacggccagccccgaggaactatccgccgatcgacccttcatctggccccggccttgagtgccattcccggccggacaggatcggttgctctggtctctgcggcgagggacaggcgctgctcggcggcgggtggcggcgaggcaggtctgaaagcacaaagcccgcacaaggcgggcttctggaagatggcgcatccggcgggattcgaacccatagccgcgaaagtgacccatttcagggtgctgacgtgcctagccgagcctgagtggattgcgtgagtgaggctggttgatggatcacccaaattttccacagcgaacccacaataagcaacgactggatgggaacggcgcacgagacaaacctgcaatgatcttaggtattcgtggccaacagtctggctggcctcactcatccaaaatgtcaattacatgctcgggtagaaaaacaatggtgtcacctgctttcaaattgttctgctcatctgagcagcatggcatgttaaccagctccccaatcaagtaagggcctgaactgcctgttacatctacccacatcctctctccgaaaagctcattctcatcgtcctcatctggtagagaaaactcgaactgcagcttgactgtgtcgcccacctttaaactgtaacgctcagactcttccggaatcgtgaaagtttttggccagcgctcattgctggcaactccgctgagtagatgccacccgtctatatctataacggctagacgttgttttattccctcgttgatcttagaggctgctttgatgcagaaaattggccgctgcccaatagctggaggctttaatgcgggctctttgaaaatagctctaagcagttcctcaatacgctgatcaagatgctcgtcgtttcgcatgtcaatagctaaagtgccaaggaactgggcgggaattgcgcacgacgggccaggagtgaattcgccatcacggataatgggaataaagcgatcacgtgacattcctgcagctatgtggccagaaattatctgctgctcatagcccacgccacccgctctgttaagcgattttctgcagtagtctctagtgcagataattagcgcatagtcacaactctgcgcttcagtctccatgaactgagttaaactctgaccgggactgatgtgccactggtcaatccgggcgttcacaccgttctttgttagtctttctgcaagggctctaacccaatttttgtgttcatcgctatcccatgagtaggatagaaatacctttgggggatttagggcttcttccatggttaagcctctgcaccctctgcaggtgcttctaaaggtgcaccttgcaagtcagcgactagttcctgtgctgttgctaacttgagattgtcgcgttgggttttaagattgctgagcaaatattcattatttagctcgaattcatcaaagatcgtgaaccaatttttaacgtaggcttttatttttccgtcgtttgtaactagacctggctctccatgcatctgcattccttggattctgcttttaatcgcatagtctttggatgagatattgcgacctatcaatatcagctcaaaccttgtaagtgcactcgtaaaggctgggtagttgctgataattgcagcatattcgtcaagttgctggaggtgcttatgattaagagcaattcccgggcgctttatctctatgattgtgcacttgaagtacttgcggccttggtcatctacatgtggtgatttacgggcaagaagtaaatctacttggcgctgtgcgccttcgataggcgctccgggtgccaaatcttcaacggcaatatcatcaattccatttattctctgccgaagctcttctgcaaccttagtgaacgagtcttcctctgcccccagaatctcgtaggctggtccaaatagccaagtattgttttctataatgccttggaggtctggcgtttctgttacgtccttataatgaatctccattagttcttttaattgagatattgcgagctctcgtttttgaagaatgtcgattgtgcttattatgtgctctagcttggtcttctgaagttgatttgaaagagtgttgagtgaatcttggtcaagctcgataatgttgtcgagcacatccagaaggctatcgttttggttagagactaaaattttatcgagaagccttactataattttactttgcttagggctcaggctgctaaatacagaggggtctgcaatgtagatatcttttattactgttttgaggaagcttagccgccacttcgcatattcggggttttcgtttttgtagtcggggaatatgccgttttcttcaaaagaaacaatctgcttctctgcttgttgtcgcaggaagtcatgatatatctccctggtgaatttaatcacttcagttaaaagctttcgccagattggagagctggtattgttgtggcttgctgatactaggtcttgcggtcgatcttcaaatgtatcggcccaagatgaagttatgtagatgctagggtagaaatttcttttcttgttaaatttactatgctgcttgtggactatcttgttctctgagttgagcaggtagttgtatgacttttcaccgccgggtttctgattccagcgtattatcttgacctcgaagttttctttctcgatcgagtagcttttggtgcggagttcatgacttggtattgatactggcttcccattcaggccaagtgatttttcgctgtgtaatgcgaggaaccaactgaactctgttgagagcttattttcaagcactgaatcgcagggaagatctcgtgagaactctgagagctctacacaggtgccgctcttttgtaaggaaagaagagcatgctgctgctctttttccaaataattaatgtggaagtcttgacctgcccccagttttagtaccgctgcctagttagtaggccctggggttgatattaatttttcctgcttcagctgctgctggcgagttcgccaacttgcagcaaattctgctggggtgagattgccaatcgcgctgtgcggtcggtgttcgttgtaatcccgccgccaggccgcgatgcggattctcgcttcggccagcgaacagaaccagtgctcattgaggcattcgtcccggaacttaccgttgaacgactcgatgaaggcattctgcgtgggcttaccaggctgaatcagcttcagcttgatgtcgcgctgataggcccattgatcgaatgccttgccggtgaactcgggcccctggtcggtgcggatcgctttcgggtagccgcgaaaccgcgccatctcgtccagcgcccgtgtgacgcgaaagccgctgataccgtgctccaccaggatgccgaccgactccttggtgaagtcatcgaccaccgtcaggcatttgatccgccgcccggtgctcagtgcatcgaagacgaagtccatcgaccagacctggtttggtgcgctcggcaaactcagacgttcgcgctccaccgcgacgccatggcggcgccgccgccgtttcaccatcaagccggcagcgcggtacaggcgatagatccgcttgtggttgacctgcacgccagcacgtcgcagcaggatgtgcaggcggcgatagccaaagcgccggcgctcttgggccagttccaccagttgggcttgcagctcggtgttttgcacactggctcgcggctggtagcgcaacaccgagcgggacagcccgatcaactgacaggcacgacgctcggagatgccagttcgcgcctgcatctcctgcaccgcctcccgccgtgctgtcgggcttacccttttccccgggcgaccactttcagcgactcgatgtcgaggtgggcctcggcgagcaacttcttcaatcggctgttttccagttcaagatccttcaaccgtttggcgtccgccacggtcataccgccaaacttggcccgccaggtgtagaacgaggcatcactgaagccgtgtcggcgacacagttccttcaccggcacaccggcctccgcctgcttgaggaagtcgagaatctgctcttcggtaaaacgctttttcactgccgtctcctgctcggaaaacggactctactaagtttgacgtggtactgaaatcggggggcaggtcagagtcggtgcagcctagtccaggctgggttgcctggagcgagtcgcacagaattgcggtgcccggaaagcgttaggagcttcgagaaggttcagggtttaggtagccttgatgtcaggcctttcaaattcgccgtgaggcaagtcctaagggactgctggtgctgctctaactgggccattgcctcctctcgccgtggtccggaaagcgagcttagccatgcttgatccctatcgagcctttgctccagctcactgatggcctcttgaattgatacgcaagggctattgctcttgatcgactcgcccaactcagctgccacagtccgggactgagaaaggagtgccgtagtttcagtaagctgtttcttggtataagccagactgtcctcagccgaagcgagctttatctcgagtgagcgtgacctcgattcaagcgagtcgactcttgtctgcagcgtgagcttgtccgctcgcaactcgtcgagttgctttgcctgcagttccaccgtcgcctgggtctttccgaactcgaccagtttccatacacccgcaccggtcaaaccaaataaaggtactgccgccactaaagccgcaatggtcttgcctagcgaccaagagccggcatgagaagctgggttatgttgggatttttggtttcctgccattttgcgctccgtggtcggcatgcatcggagcaagttggtggcagtgagccgccaattcaagggaagtcgcatcagtccgaatatgaaagagccgttgctcccagaaccaggggccctggcgaaagcgttgcgctgaaccgttggcgggtggcctggccgggcggagcgggggtggttcaacccgaaccggcagtggccacccgcgggcgggatgtcgcgaaaagcggggcagtgacgtgttactcaaaaagcaccggggcccctgaagcgtggcccttggagagggtaattcgaacctcgttcccgctctacatatgaaatttttcggaggttggttgttgttttgtcactccgccacaagccccgccacacctagctccaccgcatccaacacaccaactagccccctcccaagccggtattcctccctaccaggcgttcatcgcggcagcacgcgcccatccaactcgggatgtcccctatttccgcctggcacagatgcccaggaatatttgggcatctgcctggcgccgcactgagcggggaccggaccaaagccggactttccgacattgaggcccagggccttggctagcgcagaccttccatacatcctgttcaagggcctgcccaatcctcagcgccagccacgcgcatttcagcggcgtgtggcactacccattttgtgcagtaccccaacgaccgctgggatggtccagaccgcatccaccaaggcgaagtcgcgccagcgggccgtccgagtctccccaaggcgggtgccgtggcagagcatcaacaacgccagcaacgtgacttccggctgctcccggtagttcgcctgcaggttggtcagcagcaacgacccggacgatatccaacgtagtccccccttctctctcaatctggccacccttcggtcagccggctccccggccagcttgcgcgtctcccccagccggcggaaggggtgttcaatgctcgcagtcactccgccgtgctccaggccagcacgcccgccgcgaaagccttccgttcaagccaaggcgcaggggcgctggtgagataggcgcgccaggcgcgctccaactggacaccgtcgatattactcgccgaggctatgaaggcggcggcgtcctcgcgggcataggcgtacttcttgaatacgaacattccttcgaaaggccgggtatcgctcacatagccggaccccatcgtcgtcaacaagggcggaactagtgtcgttcccaaggtagcctgcacactgaactccctcaggtcgaatgaagaatcggcccagcaaagctggctaaacagcgcaatacagaagccccatgcatagtccgaacatcctgtccttgtcatctgacgaaaactccatctggcgcgggacaccatcgacctacaaatcgtcctgccagtcggtgctgggtttgaggctgctcaggaactcttccagggcatagtcttcgccgggcggcaaccgggtcgtgagccgactggcgggcgccaccgggtcggccgatggcggcggaccgtcgccgctggcggtctgcggcagcaggtcgacgccgaacgggtcgtgagcgggcttcttccccggcgtcggcgagctgatgccgatcagggtcgcctggtccttgcgccgcaacggcatcaccatgctgctgtcgccgttgaggtagctggccatggtcgccagggcgatgccaacgaagggcgaggccgcgccggtgtcgcccaggcgctgggtcaggtcgtagctttcccgcgagtccagcaagtccagcgaactctgcgcggcgcccagcgccggggtgagttcggccagcggcgtggcgttcaaaccgccgtcgtagaacagccgggcgggcgccggcctgagcccggcactggccgtcttccaggcagcggccagttgtgcggtgagagcttcgcgcttgagccgttcgccggtatccgggcgggtcagcggcacactcaccggccgatgcagcctggccagcaccggcaacgcatcccactgctccagagcccgctcggtccagggctggggaatgaacggcgtggggcggaactccaccggcggcttgcgccagccccagccacggaactcggggtcgatccggttttcgttgaccttggtgtagggggcgaactggcgtagccagtcgacccgctcggggcggccgacgatcagggcgaccatggtgtcagtcaactcgcccggctgtcttgggccagttcccacaccgatgggcttctctccttttgccatcagggacagggccatgttgaagccttcattggcatatatcagtactgccggcaagtcaggattgcgttcgaacaatctgaacaacgcctccaatactccttcaggcgtatcgttgcagataatgccatcctgcagattgacaatacgatgccagtgcagtcctgctggaatgcgcatgtcattaaccattgctgataggcttccctgagtctcttcaggagtgaagcgcaaattcggtgtattcgggttccaaccacgtaccaccgttacggtaggaataggccatttctccagaaagttcttcagtcctagctccagagcatcagcctctcgcttttcagaagcaatatccttgtcatcggctgtaaccggatacttcctcgggtccatcggcaggatgctgccgacatgtaaggcctcggcctgcatggcattttgctcctgcaaggccttccacacctgcccctggcgaaacacatccagactcatgcctacgctgagtacatccagggtttccaggcgcggcgacgttttcggagcgtgataagcatcagcggacatggcggcctccttggccggggcgtaggcggtaacgggcgccgccggactggcgaagcagcgcatcgaggacaattgcggctcggctgcttgcccgacagagcagctcaacagaatcccaacgagagacaagacaggaaacgtcaaacgcattagatcggccctccaaagcaaacagggcgatcgtaatagcgatcatttatcgtttgcgtcgccactaagctaggtaaggtatttccaacaatcgagggaatggccccacttctgcgataaatctctgtggaatcgatcagtttacggtttccagcttcttccgcgcgatataaggcgcgaacatcttcatcaggcaggtctagttcggtatctgactcaacttgcgctcttccttttgcgcgagttgcattccaatccaaccgccaatccgccacccgacacagatactgatagaaaaccacatcatccacgctgtccccggccccgatggccaggtcataggccagtacccgccggttatgctccgggttgttgggtatggccgagtggaacgacaagggctccagatggccctccgccgtctgcaggcgcagccgggcctcgtagggagtttccgcgcgggtgaccagaaccatgccggtgcccagtacacgagcggaaaacacatgggtctgctgggccaattccttgccttcgttcaacgccctctccacgctgcgcgcgtcgcgcccgtagcggtacgccagcgcggcgtccacctgttgcgcgacggcgtgcccgctgtccttttccttccagccgccgttgcttacgccgatggcggcgtcgatcggatcgagggtatcgcgcacctgatagacgccgctggcggagttctctcccggcgccgtgacggttccgtcgaagtcgaatcgcgcttccgtcggcaacggcagacgcggcgcggtcagcagcacgctgtcgccctggtcgaagttcgcccggccgaatctgtccttgccgcccagcccggtgtcttcccaggtcttctcgccggccagcagaagagggtagacatggggaggggcgtgcccgccgatcttttccttctcgccattgcgcttgcgtacggtgaagatgcgctggtgaaaaccctgcggcagcccggtccttcccgggagccccttgacctgctcagcaatgccgcgccagccgataccctggacgttggcaagtcccaccgtctggtcctggggcgtgaaatacaggtagacactgccgcgattgtcgcgctcatcgaagctgagccgttccccgtcgatggtcgtctggcagccctggccacccacccagccggggccgcctatcgcgccgtagccttggcagttgcgcaacgcgacgctgctcagcgcggggaccggatggcgtcggccgcagatgaactcgaggatacctttgagcgtggccagccgcgcctctctggtctgctggctgctccagccctggagcttctcgttgaggggttcgaacaggccgtagggtgagttgagcatgatcaccccgtccgccggctccacgccgtcatccttgaggaaggcatgtgccagcagggtcaacagggtgccctggctgtgcccgacgacattgatggtgtcgtccgggtaacgcttgcggatgatcttgatcaacatggccaggcgcatggccgcaaggaccatgtacttgcgccctgccgccgaaaacagcggatgggtcatggtgccgccgaaccagtccagcgagatgaaaccgaacagcttgccgttgaaaccctggccccacatgtccggcaggttggtggtggcattgacgaactgcccgccttccttggtgccggacttgtccagccggttgccgttgcggtccagccattcgccgtgggccgcggtcttgttgatgtattgctcttcctcgcggaagccccagtagaaaggtacgactacgctgcgtacggcggccccgccggcgccactggcgaacttgcgccggtagtagacgacgtcggggttctctgccttgccttcgtcgtccgccggcaggctgtagcccgccggcgtcaggtagccgggattggcctgcccgccgggcaaggtcggcggcatgtccaggcgttcgttgagcccctggcagagccctcgctcgatccgttcgtagcaacccgcgagatcgttgacgccatgcaccacgatggtcacgcaaggcttgggcggaggcggcaccaggtgcacgtcgccgcccttgggcaaggtgatggactgggcagagacgatcgtcctcgaccgaaccctatcgttcatggcttctctccttgccgctcctcggcgttgcgtcgtgccaggcaggtcgcttcgtcgagcagcatccagttgccaggttcgccggccaggcagaattcgacggcaatgctggaaaccgtttgctggtgccgacggctacgctcgttgaaatgaatgaatgcgttgtagctcccatctggctgcaagcgctccggccggcgcaggagcacgctggagccgggatagtcgccgaagacctcgatctccccggcacgccacccgggcgggagctcgatccgccacagcgtttcctggcaatggctgccgacccgccgacataccgaaacacgggtgatctcgacgtcgttggtttccgccagcaaggggcgtagatcgagtgtcacgcgcccggagccggcgtgtaccgggatctgcggtggcagtttggaaacggccagggcctgggcgcttcccaggccgaacaggcaggcaatgagcaaggtcttgcatttcattggtcagtatcccgttgggaagtttttcagtacgccagcgaacctgctgttcgcagaggcttccccgaactcgttcttctcgaggaaataatctcgaacgatgtctccctgctgttcgatgttgtagtccttcaacgtctttcccggctccaaccggtaggcgtactggtcgcctaggagaaactgcctggcttgctggtaggcccccaccagaaggacgttgacgccatgctggtgctgccagacatgggtcatttcgtgaatgaacagaccctggcgctgcaggctctccaggctccagtccgccacgccgcgcaactcctcgccgaagtagatgtggccgttcggcgccatcacgtagtccttgccctgccaggggacatagtcctcgtcgcgcaggcggaccgtggaatagtcgatggaatcgccgaatacgcctttcgccaggctgatttccccttcgctgagagcacgtccggcctcggcgtcggggccactcaggagcttgccgactgcaaccgccgcgccaaccgccgctgctatcccggcaactgcggaggcgggcgatttcgtgtgtttcatatcgaccttggcgatgttcatcgcatccttctgcagcagctgggtagcgccttcggcgtcggtgacgccctcgatgacctcgccgttggccatggtgatggtatagggcacgttgggcatggccgtctgcccgtccagttgcttgaggacgaaccgccgctgcgtctcgcccacctcgaactgcggcagctcggcttccaggctggccgcgccgacatgactgtgcttcgccgccttgaccacgaagttgccgggcatgcccagctcgatgttgccgcccttgagggtcaggtaggcgccgccgcacatcagggtgatgtgctccttcgcggtgaccagcacgtgctgctggctggcgctgacctccacgctctgctcggcttccaggcggatgtcgttcttctgcgcctgcagcagcatcgggccctggtgggtgatctggcgcagctcgccgccctgggcgaacaggccgatgtcgctgccggcgttgatcaccaccttctgcccggcggtcacctgctggttctgccgggccacgctgtcgacgtgctcgccggcggccagggtcaggctcgccggcgtcgccgcggcgatccctgccggaccgctcaaggcgatcgccggcttgcctccgttgctcttgccggactcgtcgttggcgccgtggccgaggtcgcgcacggcttcctggagggtttgctgcggcgccgcgtcgtgccccacgccctggtgctccccggcgtagtcgcccagctcgcgggccagctccagcgcggcctccagcacctgcaccacgacgcctcggtcgagatggccggcgccggccctgagctgctcctcggtgctcagcagcagccccttggccgcacgcaccgcgccatgttcgtcggtgcgcagttcgaagccctcgccgcgcggcttgccgccttcgggccgaggatgggtcaggtagcccaggtgcagcgcgctggcaccgtggtcgctcatcagcgccgcactgatctgcgccgtggtgtcgtcgatgcgcagctcgttggcccggctgcccttgtactccttgctcttgatggtgctgaggatcttgtggtcgggcagcgcgtagggcggccggttggtcgcccggtaggtacgcccggtgacgatcggctggtcgcagtcgccgtccaggtaatcgacgatcacctcctggccaatccgcgggatcgccatgtgtccccagtcggcacccgcccagttctgcgcgacccgtatccagcaggtactgaactcatcgtgacgtccctcgcgatcccaggggaactggactttcacccgtccccactcgtcgcaatggatctcttcccctgccgggccgactaccgtcgcgatctgcggaccatcgatacgcggccgaggcagcggtgcgggacgccattcgacgtcctcgggtaccagttcggcgcgcaggtcgtagctcacccccagaggggcgtcggcggactcttcctcctggccggcatactgggtgccgcgatggaccacccgcaccggccgccaccaggcgttgaagtcggcacgcggatgaccttccagggcaaaggcgtggcccgggatcagccgcgggtcgtcgccgctgaccgatgccacccgtgcatcgcgccgatgtcctctgaggcggctttcgctgaaaggccggcccgcgccgctccgcttgtagcgaccggggtagtcgtagcgctcgtaggacgagtcctgatgctcgagcgcctcgccagcgagatgatgctcctggtcgtaggtcgggcgcttgaagctgtagtcccgctgggtctgtcgagccgtacgaacattttcgctgtagcggaaagaatgaagcaccggctgcgggttgtcgccctccggctgggcgctgaacagcaccgggccgccggcgatacgctcctggacgtagagccggtcgctgcagaccagggtgtggcggtgttcgtcgaagcggaagtagtagaccaggccttcctcgaaggccagccggtcgtgcaggtagtgatcgctgtcgccggcctgcacgcagtattcgcgcggcaggtgctcatggtagatgcgctgttcgtagtcgagcacccggtgctccttgagcagcgcctggagaatctccggaacactcttctcctggaatatccgccagttgcagcacagctccaggcgcgccaactgcggttccagcagcagttcgtagcgggtccggcgaaaacccgagctgccctgggtgaagtggctgacgatgccatggacgtagcgggccggacggccgtcctgccagagggtgaaggtgcccggctggtcgagtacctgcctgaaatcgatggcgttcttgtcgctggccagcttcaggttcaggcggaaaggctcgcagagcgcttcttccagttcgaactcgacgacatcgaacgcgagtttcccttcgccgacgacgaaggtgaatttcaggtccctttgacgcatggatcgttccttgttcctggcgggcggttcctcccccatccgttggagaagcgagccccacgttactcttgctcagccgctgccgaaagtcttggctcggtgtctatttcgcgaagtagcggacattttcggctcgacggagaaccggccgtacaggtgtacgaccggtgtgcctgtcaactcaccctgcgaccggggagcgccagtcgtcggagccggaggtgccggagacttcgtgggtccaggtgatcttgcggtaggtgaagtgcacgtcttccaggtgggtgaagtgggcgttgcccgggtcctggcagttgtgcatgtagtccttgatgtcgacgatgatcgcgtcttccaggacggtggtgtagtagtgctcctgggtgccggcggcggaggtgcggtaccactggatctcgaccttggtcaggcgctcgccggaggtcagggcggccagcagcaggggcgaggccttgtcgaagaccttggtgatgaccaccggcttgtgcacgcgctggccggtcggctggccggactgcgggtcgcgcgggatgatcacttcgtggttgaagccctggaccatcacctggtcctcgtggccttcctggtaggtgttgccgaccgaatcctcggtgaaggcgccggcggtgatcaggccctgcttggtgccggtgatggacatataggcgggggttgccatggatacgttccttgtcgttgaaagtgcccaagcgatatgccgggggcatcggtgctagacaagaaccgtgccactagtcttgaaactcttttccatcaaggcgttattgggggaagccaaaaattcgctggcgattctcatgggaagaacactgaaaattgcgcaactttttgcacaccgcttgcaaaaagttgcgcattctctcggagccctttgggtgtttgttccctagcgttctatccacagctttatccaccaaaaagttgcacaatggcttttggattgtgaggctgaatggtcggagtattttctgcctctgcccctatccaaacaacgcttcagcacgggtagtctgattgtccaaacgttcaccaagcccagccggtacaagctcacctttccaccgtatgcgtgacctctccctcagccggtattcccccaatgggggcgaaccgccgttcaaatgcgggtggccggcttgaagtcggatagtctgacctcaaaaccggcaaatcgccggttttggatctcctgcattgcagacaaaggctcgctgcgttcaagcgcaaatacgggaatatcccgcatttgaaaacccggcttcaaaagtacgcaaaacgtccttttgactgcggacgaaattcgtcgtcagtcggtgttttgtgcgtccgaatttcggacgcacaaaatcccccagattcggggtattacgagagtctcgtaaaactctcactccagccaccggctgaagccgccactacaaaatattcgtagtgaacatgccctgatttttcaggagatgatcgcgcgaccgtggccgcaattttgtggagatggcgaccccgctgagttacggcctcgggcattaacgttggagcaacgttggctaacggtggactaacgttgatcgcgttaccgggaaggggcgcatttcaagtgcgccccttggcgcgaccagcgatggctccgaactgagccatgggctaacgcggcgctatctcacaaccaccaatgggggaagtgaggagaatcccaccttgcctgaccaatcgccaggggatcgaacttaccgggagcgacgcaggccacccggttgccctgctggaactgacgacagacatttgagctggccggcataaaaaagccccgcctgagcgattcaggacggggctttcctttaggcttactgcacccaccatgcacccatgagaggtggcttgtggctaatgacttttggtaagtgcttgatttgtatggcgcatccggcgggattcgaacccacgacccctgccttcggagggcagtactctatccagctgagctacggatgcagcgccgcggctcgcgcggcaggccgcaatcatacgcatctcgtcggcgggagtccattccatgtgcgtacgttcgtgatttcgaacgaaaatgaccgtccgtcgaggatgtgctcagaaaagcagcagaattttccgactttcgttgattttatcgaacggggtattgccctttgtcagtggtggccctaggattcgtttgagatttcaaacgcccccaaagccacaacaacaggagaccggggaattggcatcagttcagccggccgcgtgcccctggaatgacctctttctgacctgcccgtcgctcgtccggcctttcgcgctgccgggccgccgtggtgccggcgtggcgtttcgtccgcgatcccttttccgcacgagcctttcgtatcctccccgacgcctgccggcggtcgcgttcgtccgcgtccgcccgttgcgcatggtggccggccggtaacggcgacgccgctggcacagggcgcaggaaatggaacaccggggcgctggccctttcgaataaccagcaggcaacactttccggttacaaccgaaccagacaaccaggcacgcggggtagtcgaggtagacccgctgctcacggcattcctcgaaggagacaggtcatgcaactcaaagatgccaagctgttccgtcaacaagcctacgtcgatggcgcctgggtggatgccgacaacggccagaccatcaaggtgaacaacccggccaccggcgagatcatcggcagcgtgccgaagatgggcgccgccgagacccgccgcgccatcgaggctgccgacaaggccctgccggcctggcgcgcgctgaccgccaaggagcgcgccaacaagctgcgccgctggttcgacctgatgatcgagaaccaggacgacctggcccgcctgatgaccatcgagcagggcaagccgctggccgaggccaagggcgagatcgcctacgccgcctccttcctcgaatggttcggcgaagaagccaagcgcatctacggcgacaccattcccggccaccagccggacaagcgcatcatcgtgatcaagcagccgatcggtgtgaccgcggccatcacgccgtggaacttcccctcggcgatgatcacccgcaaggccggcccggccctggccgccggctgcaccatggtgctcaagcctgcttcgcagaccccgtattccgcgctggccctggccgaactggcagagcgcgccggcattccgaaaggcgtgttcagcgtggtcaccggtagcgccggcgaagtcggcggcgagctgaccagcaacccgatcgtgcgcaagctgaccttcaccggttccaccgaaatcggccgccaactgatggccgagtgcgcccaggacatcaagaaggtgtccctggagctgggcggcaacgcgccgttcatcgtgttcgacgacgccgacctggacgccgccgtcgagggcgcgctgatttccaagtaccgcaacaacggccagacctgcgtctgcgccaaccgcctgtacgtgcaggacggcgtgtacgacgccttcgtcgacaagctgaaggccgccgtggccaagctgaacatcggcaacggcctggaagccggcgtgaccaccggtccgctgatcgacgccaaggccgtggccaaggtcgaggaacacatcgccgacgcggtctccaagggcgccaaggtggtttccggcggcaagccgcacgccctcggcggcaccttcttcgagccgaccatcctggtcgacgtgccgaagaacgccctggtgtccaaggacgagaccttcggcccgctggcgccggtgttccgcttcaaggacgaggccgaggtcatcgccatgtccaacgacaccgagttcggcctggcgtcctacttctacgcccgcgacctggcccgcgtgttccgcgtcgccgagcaactggagtacggcatggtcggcatcaacaccggcctgatctccaacgaagtggcgccgttcggcggcatcaaggcctcgggcctgggccgcgaaggttccaagtacgggatcgaggactacctcgagatcaagtacctctgcctgggcggtatctgagcccggcgaggaacgcatccggaggggccggacggcaggcaagagctgcgccgtccggtgtcgacgttgccggtggtggcaccggacgaaccgggagacgcggtcgccgatcgcgaagcggctccgagccctggcgggcctgcaagtcccgaggcagtcgatcatcgcatgctgccttggggagcttccttcccgccttcatcctttgacccggccgacccgatgagcggccactgaggaagccatgagcaagaccaacgaatccctgctgaagcgtcgccaggccgcggtaccccgcggcgtgggccagatccacccggtcgtcgccgagcgcgccgagaactccaccgtctgggacgtggaaggccgcgagtacatcgacttcgccggcggcatcgccgtgctgaacaccggccacctgcatccgaaggtgatcgccgcggtccaggagcaactgggcaagctgtcccacacctgcttccaggtgctggcctacgaaccctacatcgagctggccgaggaaatcgccaagcgcgtgccgggcgacttcccgaagaagaccctgctggtcacctccggctccgaagccgtggagaacgccgtcaagatcgcccgcgccgccaccggccgcgctggcgtgatcgccttcaccggcgcgtaccacggccgcaccatgatgaccctgggcctgaccggcaaggtggtcccgtactccgccggcatgggcctgatgccgggcggcatcttccgcgccctggcgccctgcgagctgcacggcgtgagcgaggacgactccatcgccagcatcgagcgcatcttcaagaacgatgcccagccccaggacatcgccgcgatcatcatcgagccggtgcagggcgagggtggcttctacgtcaactccaagtccttcatgcagcgcctgcgcgccctgtgcgaccagcacggcatcctgctgatcgccgacgaagtgcagaccggcgccggccgtaccggcaccttcttcgctaccgagcaactgggcatcgttcctgacctgaccaccttcgccaagtcggtcggcggcggcttcccgatctccggcgtggccggcaaggccgagatcatggacgccatcgcgcccggcggcctgggcggcacctatgccggcagcccgatcgcctgcgccgcggcactggccgtgctgaaggtgttcgaggaagagaagctgctggaacgttcgcaagccgtcggcgagcgcctcaaggccggcctgcgcgagatccaggccaagcacaaggtgatcggcgacgttcgtggcctgggttcgatggtggccatcgagctgttcgagggcggcgatacccacaagccggccgccgagctggtcagcaagatcgtcgtccgtgcgcgcgagaagggcctgatcctgctctcctgcggcacctactacaacgtcatccgcttcctcatgcccgtcaccatccccgacgcgcaactggagaagggcctggccatcctggccgagtgcttcgacgaactcgcttaagcttcaccggcaaagcgatacccccgaggcccgcgcgtccgcgcgggcctttctttcagaggcttcacggaaacggaagcctcttttttctgccagggttttccgcgaaacgcccgacgaacggttttcgcctgttacccttgggcgcctggcgcatacgaatcctcccgcattcctccggtcgttccgttcgtggcgattaggacaggtcctagaggcgcaccgtgttcgtccgtcatacccttgtgtgcccgcgggccgtgtcgtgcccgcctgtcatgcctggtgcgtcccgctcggttcgccaggttcgaagaggaacgccatgagtgccgcgaaaaaggcccccgtcatcctgattgccgacccggacccctggagtcgcgacttgcttggccaactggtcctcggcgtgcgttgcgatgcccggctggtcctctgcggcgatggcggagaagcgctggcgcattgccggcgccggcgcttcgcgttgatcctggccgagctgaacctgccgcaggtggatggcttcgagctgctgcgcgaagcgcgcctgtgccgctcggtcgccgagcagccgttcatcctgatcagcgaccgcgccgaccaggccagcgtgcgcgccgccgtggcactggcgccgaccgcctacctggtgaagccgttccaggccgagaacctgatgcaacgcctgcgagggttgttgctgaagggcgacgaagtggtcgcctgtccgctgccggagcgggacgcgggcgagaacctggaggctttcctcgaacgcgcgcgcgactccgcggagggggcgccgttgctggccgacgtgcgtgccgccagcgatcgttgcctgagcgccgaggagcatccgctgcgcgtgctggaggatgagttcggccgcgatccgcagatcaccgctggcctgatcgccgccgccaacagcgccgcccggcacgtcggtccggcctgccagaccctgggccaggccctgcggcggctgggactcgggcacagcctgaacctggtgctcggtttcagtctgcagcgggccatccagctcggcgagccgctgctggccgagcgcgccatgcacttctgggatctttcgcaacgttgcgcggacatcgcctgggaactggccgacgccctcggcgcggacgtcgagcgctgctataccgcagggctgctgcatcgcctgggcgacctggcgctgctgcggacattgcaggattggtgcgatggcggcggcgcgctggacgaggcgcggctcgacgagctgctggggcgtttcggcgccagcttcggctcggccctgcgggcgcgttggcgactgccgctggagctgcgccggctgatcgctgcggcgtaccagttcggtggcgtgctttcccgcgaagagctgatcctcagcctggcgacccaggccgccagcctgcccgaggacgacgcggagcaactggccgagagcaaggctgcccgcatgctcgggctggacggcgaacgactggcgaaactgctgcagccctgagccgtcctcgccgggcctttgtcccatagggcggataacgcggcgcgtcatgcgccgctgggcatgggcgcggttgcaatcgagcctcttgccggggagatcggctcctacgcacgccgccgagttgccggccgtggatgggcgggagcgagcctagcgccgcagctcggcgcgcaacaggtccagcgccgggtcgatgtcgtcccgctcgatgcagccgaagccgaagaggaagccggcctgtgccggggtttccgcgtagaagggcggcagggtgccgacctccaggccttgctggcgcaaatgacgggcgatgcgcagcacatccagcggttcgcgacagcgcgccgcgaggtggatcccggccaccgccggcagcgcttcgagccaggggctcaggtcgccgtgcaggcgttccagcaggcgcccgcgacgctgggcgtattcgcgttgcaagcggcgcgtatggcgggcgaagtcgccgcgctggatgaacagcgcgagggcgcgttgctgcaaggtctcgctgtgccggtcgaccagcttgcgcgccgccagcaccgctttgcgcaggcttgccggcggcagcaggtagccgaggcgcagctcggggaagagggtcttggaaaaggtcccgaggtaggccacctggccgttccggtcgaggctgcgcagcgactccagcgaacgcccgtcgaagcggtactcgctgtcgtagtcgtcctcgatgatcagcgcccggtggtgctgcgcccagtccagcaactgcaggcgccgctccaggctcatcggcatgcccagcgggaactggtgcgacggggtgacgtagaccagcttggcgttgtccggcagcaggtcgacgcgcagcccctcggcgtccaccggcactccgcgcacctcggcgccggtggccagcaggctggcgcgggccggcggataaccgggttcctcgaccaccgccaggtcgccggggtcgagcatcacccgggccagcaggtcgagtccctgctgggcgccctgggtgaccatcagggcgttccagtcgcactgcacggcgcggttgatcgccaggtagcgggagatcgccaggcgcagctcggggtcgccttcggtttccttgtagaacgccggcgagcgctgttgcaggcgtagcgcctggagcacgcaggtacgccaggtatcgaagggaaagcggcgcttgtcggtcgtgccgccggcgaagctgtagcggagcggtgctcgctggtccatcagaccggactgcggttcgatgcgtgcccagcgcgcggccggccgcaacggaccgtcggcgcgctgcggcggcgcttccccggcgggcccgcgggcgacgaaggtgccgctgccgacccggccttcgaggaagccctcgctggcgaggcgctcgtaggcttcgctgacggtcttgcgcgacacttccaggcgttcggcgaggtagcgcgtggctggcaggcgatcgccggtggccaggcgaccatggaggatcgcgtcgcgcagctggcgatagagctggccgaccaggtcgtggcggccgtcgaggatcagttgcagttccatggcgaaattggctacctggtatttctggtaattggctcttcgtggaagccaaaggcaggcttagtgttaccccatgccgcgccgctttccactctcgcggctgccaatcagccaaggagattcgccatgaccacccgcctcgaatgggccaaagcctcccccgacgcctatgccgccatgctcggcctggaaaaggccctggccaaggccggcctggagcgcccgttgatcgaactggtctacctgcgcacttcgcagatcaacggttgcgcctactgcgtgaacatgcatgccaacgacgcgcgcaaggccggcgagaccgagcagcgtctgcaagcgctctgcgtctggcaggaaaccccctacttcaccccgcgcgagcgcgctgccctggcctggaccgagcaactcgcccgcctcagccagggggcgttgccgcacggcctgctcgacgaactgcgcgagcacttcgacgacaaggagatcgccgaactgaccctggcggtctcggccatcaacgcctggaaccgcttcggcgtcggcatgggcatgcaaccggaatgaggtggacggcgatgaaggccaatcgatcgatcgcctgcctgctgctcgccgcgctgccgacgctggccagcgcccatgttgcggagaaggtggaaaccctgcacgaccaggccctggccgagtttcccggccatcgtgggttgatgctgacggtgtcgttcaagcccggccaggtctccgcgccccatgtgcatcccggctcggtgttcgtctacgtgctcgaaggcaccgtgcagacgcaactggaaggcggcccggtggagacctacacggtgggccagagctggtacgagccggcgaacgtgccgcacctgctggcacgcaatcccgatccgatgaagccggccaagttgctggtctgggagttgctcaaggagggcgacccgatcctcaagccactggagcgcggcgcccactgaggcgtcgctcgttcgcccggaggagcgtccgtcatgagcgccagccaggtcatccgtattcgcgcgcgcaatggtcagtcggaacggcttggcctgcgcctgcaacaactggtcgaaccggggctggaggcgccgggttgcctggagtaccaggtgcgcagggacgccctcgagccggatctctggctggtgtgcagccagtggcgggaagcgcagcagatgttcgactatctggccggcggcatccagcaggtattcgccgaagtgctctggcgctccctggcggcgagcctcgaagtgcaggatgacgcaggctagagcaaacccagctcggcgcagacgatcagtacctgctcgcgcagccagaggttcgccgggtcctggtcggcggcgcggctccatgacaggtgcagggcgaacggcggcagcccgggcggtgcgaggcaggcgtgatggctgccatcgtcgagcagtgcatggatacgccgtggcagcatcagcacgaagtcgctgcccgacagcagttgcagggcggcgacgtagctgttggcgcgcgcggcgacctcgcggctgcggccctggcgtcgcagccacgtgtccaccaggttggcgttgctggcgtcgagcggggtcgggaagacgaagcggcgcctgcagaactcgtccagttccaggcgctcgtggcgcggctgggcacgatcctgtacgcagagcagctcgtcgctgaacagggcgagcgcctgtagctccggtgccggtcggtggtactcgggaccgaagtcgaagaccaggtcgacctggccgtcgagcaatgcttcggtgggcagttcgggacccaggcggcggatgtccaggccgatcctcgggccgttggcggcgagccgtcgcaggagtgccggaaggatcagcagctcgacgtattccggcgcgcagagggtaaaggtccgcggctcgccacgcgggtcgaagctgccctgggcggcgtgacaggcgttgatgcgggcgagcatttcctccacgtggggcagcatggcgcgactcttgtgggtcggctgcatgccgccgcgggtggcgatgaacagctcgtcgtcgaaggcctggcgcagcttcttcaggcagtagctgaccgtcgacggactgaggttcaggtgttcggcgacctcgacgaggttctgtcgttggtggacctggaggaagaccagcaggtcctgcatgtcgaccttgcgcaggccgttggcgatcagcatcggggcgtcctgacggcgtcgggagcgccatcagaacccgtccctttcctcagcgcaagctttcggcgccgacgcctcgcgcctgccgctcggcgaacagtgccgcataccgccgcgggtcgaagcgcaggcccagccccagtagcagcgccgccaccgtggccagcccgagccaggctccggtgaagctgccgaggctgtcgcgcagcagcccggcgatccatggcgagaccccggcgatcaggtagccggcgccttgtaccagggcagccagttgaccggcgcgttgcggcgcgtcgaagtggtcgaggcagacgatcaagcccatggggaacagcccgccgatgcccagtcccagacacagcgcccagagcagcggcaggctggccggcgcccaggcgaggccgaggaagccggccagcatcagcgccgttagcccgaccagcaccgggcggcgatcccgcgagcggctggccagggccggcgcgagcaacccggagagcacctccatggccgtcaggaaaccgagcagcagcccggattcctgggcgctccagccctgctccaggtaatagggcgcgagccaggccagcacgcaggtgtagcaggccgtgccgaggccgaagaacaggaccagcagccaggtccgcggatagcgcaggaggctcctgcccggctgcgcgtcgggcaggcgcaggcgggtgccgggttgcagccaccaggccagcagcgcgagcgcggcgagcgccgcccaggcaccgaggccgagccgccagccggcgtgctccgccagggtcggcgcggcgctggcggacagcgccgcgccagccatgatggcggtgacgtagagccccatgcagagcggcgtgcgcgcgccgaaacgggccttgatcagggccggcatcagcgcctggatcagggcgatgccgagaccggcgagcatggcgctgccgagcaggtcgggcaggcctcggctgcccaggcgcagggcgctggcggcgccgatcagcagcagggcgagggccaccgaacgccactcgccgacgcggcgggcgatgcccaggccgaagaacatgccgaggccgagggtcagcaccggcagggcggtcagcagcgagacggcgccgaagctgagcgcgatctcgccgcgcatggcgttcagcagtgggccgacggcggccatggagggccgcaggttgaggccgaccaggacgatggcggccatcagccagagggtgcggccgggtgggttggcagtgggcatggcgatctcctttcgggagcaccattgcgcctgcgccagggcgtggcggcaaatcaaaatccgcagggcggattcgaaaaaatgcgctggccagggagtcggggcggacgctggcgcaacgttgcgagtcgcgaggttatccgccccgtgcggcgcgtggcctcactccgcactcaagcgcatcaggctttcgctcagggcacgcgcgtggcggtcgacgatgatcggcgcccagggcctgccggaagcgctgaccagcgcgctgctcttgctgttcaggtcgcgcagggcctggctcaggtactcccagcggttttccagtttcttcagtcccgccgggttggcgctttgcgccaccagcagggcgatgcgccggtcgatcagcgggaccagcacgctctcatcctggccgagatagtcccggggctgctcgcgggcagtctccagcccgcccaggtaggcgcgcgccaggtattgcagggacaggtactcgacccgcaccggcaactgccagagcggcaggggctggcctggcgggggcggcggcacctggcgttccaccaggttgaggaagtcacgcagggcgcggctcagttgctgcgggtagcgccagggcaggtcctcttcgcgggggccgtaggccgcgccttcacggatgcgcgccaccagcgtcttttcgccttgccgcaggagcaccccctcgggggcggcggcgagcgcccgatcgaggctggcgaggtccttctccagttgcgccgcgtgctgttcctggaaaccctcgccgcgcagcaacaacaggctgcccaccgcgcgacaggcctggacctgcagttgttgcagggcgcgttgctggtcgtcgagggcggcgcgcgccggcagcaccagcagcaggcagtaaagacagaggacagcgggaagcgcgggacggagcatggggagatcctgttgttgtcgttatggatatccgcaccgagggcaggtgccctgcacacggtagccggccatggcgcgcctgcaagcgttcgaaagtgtgattcgcgctcagccgtgggtggccgcgcgcaggccggcgaggtcgagaatctcgatgccgccgtagctgagctggaggatgccctgggcttcgaggtccttgaggatctggttggtggtctgccgcgacagcgacagcatcaatgccaactgctcctgcggcaggtgcaggacctgccggctgcggctgttgtcgtagccctcggcgagcatcagcaggcgccgcgccaggcgttgtgcggccggcagcagggccatctcttccagggcgatgaatgccaggcgcagcttgtggctcatcagcagggccatgtcgcgccagtaatgcggctcgcggcgaagcagttcgagcagcgccgcctgcggtacctggagtagctgggtgtggccttcggcgtaggcgtcgtgggtgcgcgcctggccgtcgaacagggcgatctcgccgaaccagtgcggcgcttccaccaggatcagcagcgcctccttgccgttctcgctgaccgcgctgatacggatcgcgccctcgaccacgcagtacagtccgcagggcgcgtcgccgcgggcgaacaggcgctggcccggcggcaactggcgcggttgggcgagtgccagcaggtgcgtctgcaaggcctccggcaaaccctggaaccagcggccggcctggagttgcgaacggtagtcggtacgctcgttcatgtttgtcgtctagctgacagagtggaaaaccggggcggcgcgatgatgcgagaaccctggcgtgagaccacaacaatgaaaaccctagtcgatcaccttgcgcaatacgccgcctaccaccgcgaccggcgcaacatcttcagccatttcatcggcattccgatgatcgtcctctccatcgccgtgttgctggcgcggccggcgctggggttcggcctgtctccggcgctgctgctggcgctcgccgcggcgctgttctacctgcgcctggacctgcgcttcggcgtggccatgacggcgctgctggcgctgacggtgtggggcgctgcgcaattggcggcggggactaccgcggcctggctgggctggggcgtcggcctgttcgtggtcggctggatcatccagttcgtcggtcattactacgaagggcgcaagccggccttcgtcgacgatctcagcgggttgatcgtcggtccgctcttcgtgctggcggaactggcctttctgctggggctgcgcggcgacgtgcagcgcgaggtcgaggagcgcgccggcccgacctgcattcgcgagcacaagcgggcggcgtgaggcggtctcccgcgagcgcgggagaccggggtgggagcgttacttgcgatccgcagcgatgcgctggcggatgtgatcggcgcgggcctgggagcccgggtgcgaatcgaacatgctgctgtcgccgccgcccagcttggccagcttctcgaaggcggtgaccaggccctgggtgttcactccgcgcttcttcagcaactcgtaggagaaatcgtcggcgtcggattcctgggactgggagaactgcgcgttgaccagcgattcggtgagttcgcccagctgggagccggacagggcggccagcgcgccgctcttcgaggcgccggcggcgccgcgcaccgcggcggccgcgtaggcggtctgggcggccttgcgggtgtggccgagggcgacgtggcccatctcgtggccgagtacgccttcgatctcgttgtcgctcatcagctccatcagcccgctgtagacgcggatgcagccgttggccatggcccaggcgttgacctcctcggtgaggtagaccttgtagttcaccggcacgccgtcgatctggtcgcccagggccttggcgatcttgtccaggcgctggccgtacttgctgttggccggggcgatgcggttttgctggtcggactcggcgcaggcctggtcggcgacctggcggacctcggcgtcgctcagggttgcagccttcaccgccatcatgccgtgctgcatgaggtccccctggggcaggttctggcagccggccagggtggcgcaggcgagggccagggcggaaagggaaagacgggtcttcatcgtgtgctccttgcgataggtggcgttccgtgccggacgggcgtgttccgcccggtgccgcgcgcccggtgggggtcgcgcggcggcggatgatagcgacttgtgccgttcgtcggaagtcccgcgaaggccgcaggcccgccctggcgggtgcgcaacgcgtccctggcgtcagtggaaaccgcgccaggcgaggtcggcgccgagcagcaggagaccgacgaagaagcagcgcctgaacagcgtcgcgctgatccgctggcgcagccactggccgaggagcatcccgcccagcgccgggaccagggtcagcagcgaggcgccgagcatctgcggttcgagcaggtcgccatgcacgccgagagtgaccgccagggccagggtcgaggcgctgaacgacaggccgagggcctggaccagttcgtcgcgctgcaatcctagggctcccaggtagggcaccgcgggaatcacgaaaaccccggtgaccgcggtcagcgcgccggtcgccagcccgaccagcgggccggcccagggctcgtggcgtgccggcaggtgcagcgggatcgcggccaggccgagcagcgcgtaggccgccagggccaggccgagcacgccggtggcctgccttggtgcgtcgccgccgagccatgcgccgaccagcagggtgcccacgatcaccccgagcagcaggccggccaggcgcttcatcaagccgaggaagcgcgggccgcaggcgagctgccagaggttggtcaccatcgacggtacgatcagcagcgccgccgcctgcatcggcggcatggccaggccgagcaggcccaccgagaccgtcggcaggcccaggccgaccacgcccttgacgaagcccgcgagaaggaaggtgagggcgatcagtgggatcagggcgtggaggtcgacggacatgcgggttcttccttgtctcgggctggctcgaacgggcgatggcggccagtatctctcgtcgtcgacaggcaatgtttcatccggaggtgaagcatgcaattcaatcccggcttcagttcgctggcggcgctgctcgccgatcccggccgcgcgcagatgatctgggcactgatggatggcagcgcccgcccggccagcgagctggcgctgctggcgggcgtctcgccatcctccgccagcggccacctgggacggctggtcgagggcggcgtgctgagcctggaggcgcgcgggcgcaatcgcttctatcgcctggccgggccggaagtgggacaggcggtggaagcgctggccagcgcctccctggccctgcagccgcagcggcgcagcctgccgccgagccacggcacgccgtcggcgttgcgcgaggcgcggacctgctacgaccacctggccggcgaactcgcggtcggtgtgttcgcacggatgctggatgccggctggatcgagcaggagggcaggacgctgcgcctgagcgcgaccggcgaggccgggctggccaggttgggaatcgacctggcggaggtccgccgccgccgtcggcagttcgcctgcgcctgccccgactggagcgaacgcaagccgcacctcggcggcgcgctgggggcggcgttgctggaggcctgtctgcgccagggctggttgcggccgcaggacggctcgcgggcgttgcaggtgtcgtcgaagggccgcgcgggactgcgcggcctggcggagcgcacggcgggctgaacccgccgcgggatcagagattggccaccggctggaaggccttcggcttgaagtagagggtctcgccgcgggccaggccggccaggctgtcgtggtccttcaccacttcggcttcgatcagttcgtcctggccgtcgaccttcagcgttacccgggtgatcgcccccagcggacggatgtcgcggacctcggcggcgcggtgctcggccaccgcggaacgcgacagcgacacttcgtgggggcggaacagcaggtgctggtcgttgcccagttgcaggcggttggagtcgccgaggaagtggtagacgaaatcgctggccgggttctcgtagacctcgccgggcgagccgatctgctcgatcacgcccttgttcatcaccacgatgcggtcggccacttccatcgcttcttcctggtcgtgggtgacgaacaccgaggtcaggttgatctcctcgtgcaggcgcgccagccagcggcgcagctccttgcgtaccttggcgtcgagggcgccgaagggttcgtcgaggagcaggatcttcggctccaccgccagcgcgcgggccagggcgatacgctgccgctggccgccggagagttgctctggatagcggtcggcgagccagtcgagctgcaccatgttgagcagctcgtggaccttggccttgatcgcggactcgcccggccgctcgcccttgggcttcatgcgcaggccgaaggcgacgttgtcgaacaccgtcatgtggcggaacagcgcgtagtgctggaagacgaagccgacgttgcggtcgcgcacgtcgtgctgcgagacgtcctcgccatggaacacgatgttgccggcgtccggggtttccagcccggcgatgatccgcagcagggtggtcttgccgcacccggaggggccgagcagggccaccagctcgccgctctggatatccaggttgatgttgtccagggccttgaaggcgttgaagttcttgctgacgttacggatttcgatgctcatggttcattcctcgtcagcattgcttttcagtcgggacatgcgggattcgctccactgcttgagcagaaggatgaccagcgccatcagcagcaacaggctggcgacgctgaaggcggcgacatggttgtattcgttgtagaggatctcgacgtgcagcggcagggtgttggtgacaccgcggatatgcccggaaaccaccgataccgcgccgaactcgcccatcgcccgcgcggtgcagagcaccacgccgtagatcaggccccacttgatgttcggcagggtcacgtgccagaacatctgccagccgttggcgccgagcaggcgggcggcttcctcctcctgggtgccctgctcctgcatcagcgggatcagttcgcgggcgacgaagggcacggtgacgaagagggtcgccaggacgatgccgggcaccgcgaagacgatctggatgtcgtggtcgctcagccattcgccgaagtagccctgggcgccgaacaacagcacgtagatcaggccggcgatcaccggcgagaccgagaacggcaggtcgatcagggtcaccaggatgctcttgccgcgaaactcgaacttgctcacgcaccaggcggcggcgacaccgaacagcaggttgagcggcaccgagatagccaccgcgatcagggtcagcttcagcgcggccagcgcgtcgggttcgaggatcgcctcgaagaaggtgccgaaaccctgcttcagcgcctcgctcaggaccacgtagagcggcagcaggaggaacagggcgaagaccagccaggccaggacgatcagggccaggcggccgccggcgttgccgcggcgggaggcgctggcggtggcagcggaaatgcttgcactggacatggcgccctccttacggggtttcgatgcgacgctgcagcaggttgatcagcagcagcaggatgaaggacaccaccagcatcagcacgccgatggcggtggcgccggtgtagtcgtactggtccagcttgaccatgatcagcagcggcaggatctcggtcttcatcggcatgttgccggcgatgaagatcaccgagccgtattcgccgacgccccgggcgaaggccagggcgaaaccggtcagccaggccggcagcagcgccggcacgaggatatggcggaacacctgcagcggcctggcgccgaggcaggcggcggcttcctcgacttccttgggaatgtcggcgagcaccggctgcaccgtgcggaccacgaacggcagggtcacgaaagtcagcgccagggtgatccccaggggggtataggcgatcttgaagccgaggtcgctggcgaactggccgaccaggccggccggcgcatagagcgcggtgagggcgataccggcgacggcggtgggtagggcgaagggcaggtcgatcatggcatcgatgatcttccgtccggggaattcgtagcgcaccaggacccaggccagcagcgtgccgatcaagccgttgagcacggcggcggcgagcgcggtgccgaagctcagcttgagcgcggcgagcacccgcggcgcgctgatgatggcccagaattgctcccagctgagctgggtggtcttgaggaacatggcccccagcgggatcaggaccagcaggctgaggtacaccagggtgtatcccagggtcagcccgaagccgggtatgaccggggaaatgcgtcgtgacatgttctgtccttactctgcgttggaacgcttggtggctctcccggtgccggttccttccggcagtgggcccggtacgggaccgggcctgctagccccctcgcccgtccgggagagggtctgggagaggggccgtggttcgggcgacgggtctgccgtcgcgatcattgcgcctggtagatctggtcgaagatgcccccgtcgttgaagaacttcggctgggccgtcttccagccgccgaaatcggagtcgacggtgaccaggttcagtttcgggaactgcgtggcgaactcggcggcgaccttctggttgcgcggccggtagaagttctgcgcggcgatgcgctggccttcctcgctgtacaggtattgcaggtaggcctcggcgaccttgcgggtgcctttcttctcgaccaccttgtcgaccaccgcgaccggcggttcggcaaggatggagatggagggtacgacgatctcgaagttttccccgccctgttccttcttcgccaggaacgcctcgttctcccaggccagcagcacgtcgccgatctggttgttgacgaaggtgatggtcgagccgcgggcgccggtgtcgagtaccggtacgtgcttgtacagcgcctgcacgtagtccttggccttctcgtcgctgccgtactgcttcttcgcccaggcccaggcggcgaggaagttccagcgcgcgccgccggaggtcttcgggttcggcgtgatgacttccacgccttccttggtcaggtcgccccagtccttgattcccttggggttgcccttgcgcaccaggaacacgatggtcgaggtgtagggggtgctgttgtccggcaggcgtgcctgccagtcggccggcagcagcttgccgagcttgtgcagttcgtcgatgtcgccggccagggccagggtcaccacgtcggccttgagcccgtcgatcaccgcgcgggcctgcttgccggagccgccgtgggactgctggacggtcaggtcctcgccgccctgggccttccagtgcttgatgaaggccgcgttgtaggcctggtacagctcgcgggtcgggtcgtaggaaacgttcagcagttgcgtggctgcggcaaccgggccggagaccagggcgctggcgagtgcggccagggcgaaacgacgaagggacatgtgcagctcctaggtgtgtgctgtttcgattgttctaatggggtgttggcggaacgacgggaacacggggcgtcaggcgcgcattcgcggccgacagctgcagtaccggtgcggatggggtatcgaacggatgttcatggcgagacgcctccggtggtccagtcgggtcgtgtgcttcaggcctgcttgacggccggttgctgcagacggaatttttccttgcgctcgatctgcaccacctggccgttgtgcacggtgatctcgacggcgccgaagcgcaggccgcgcagggcactctggatttcacgcaggatggtggcttcgtcctggccatccaggcttctgagggttgcgctcatgggtctctgctcctgtggctcgaggtgccgcgttgctcgacgaagtggaggcggcgtgaggcgcatagtaagcagtgggcaatattcttaaaaatattgtttaagaatctttataggtaaagtggttataagacggcgaagcggcccggcttcgccgccaggctcagtcttccggcagcgccacgggcggcaggtcgaagcgcagcgcttccgccggttgcggccgtccgtaccagtagccttggccgaagtcgcagccatgttcgcgcaggaacagcgcctggtcctgatgctcgatgccctcggcaaccacccgcagccccatgctttgcgccagggcaacgatcgcccgggcgatcgcggcgtcgtccaccgcgccgggcaggccggcgacgaagccctggtcgatcttcagcttgtgcaccggcagccgcttgaggcgcatcagcgaggaatagccggtgccgaagtcgtcgatggccaggttcacgccgaggatgcgcaggcggcagagcaggttgagggactgctcgaagtcctccatcaccgcgctttcggtgacttccagctccaggtagcggggctccagcccggactcttccagggcattggcgatcctttcttccaggccgccgcggttgaacagccggctggagacgttgaccgcgacgaactccagctcgacgccgcgctgttgccactcgcgcatttgccggcaggcacgcttgagcacccagttgtccagcgcggcgatcagcccgcattcctccgccaccgggacgaactcgcctggcggcaccaggccgcgctcgggatgctgccagcgcaccagcgactcgacgccgacgatccgcccgctggccaggtcgtgcaccggctggtagtggacgcgcagttcgtcgtgatccagcgcatggcgcagggccgattccacctggacatgggcgcgggcccgggcggtcagcacgcgggtgtagaaggcgtaggcgttacgcccgctgtccttggcctggaacagcgcggcgtcggcgtgttgcatcaggtggtcgacgtcgctggcgtcttccgggtagaggctgacaccgaggcttgcgctgatatagatcggctggcagtggatgtcgaacggcgcgttgaaaccgtcgaggatgcgctgcgagaggcgcgcgacggcttccgggtcgtcgttctcgacgaggatggcgaattcgtcgccgcccagtcgcgacagcaggcagcgctcgtcgagctggtgttgcaggcgcttgctgacctccttgaggagcatgtcgccagttgtatggccgaggctgtcgttgatgtgcttgaagtggtcgaggtcgatcagcagcagggccccggccaccgtccggtccttgccgttctccagcgcctgctcgatgcgctcgcgcagcagcacgcggttgggcaggccggtcagcgagtcgtggtgggcgaggaagtccagctcgttctccgagcgcttgatgctgctcaggtcggagaacaccccgacgtagtgggtcagctggccctggtcgttgcgcaccacgcggatgtgcagccactgcgggtagatctcgccgctcttgcgccggttccagatttctccgctccagacgtcctgctcgcgcagggccagccacaggcgctggtagaacgcctggtcctggcggccggagcggaggatcgccggggtcttgccgagcacgtcttcggagcggtagccggtgatgcgctcgaaggaagggttgacgtgcacgatcaccgcctgggcatcggtgaccagaacgccctcgcgggtgctgtcgaataccgccgcggcctggcgcaggtggtcttccttgagccgctgcagggtgatgtcgcgggccacgccagtgtagtgcagcggcttgcccagggcgtcgcggaggacccggccgcgcgagtggatccagcggtagtcgccgtccttgtggcgcaggcggtagatgtggtcgagattgtcggtcaggccctgcaggtggttgcggtgggcctccagcacggtggcgtactcttcggggtgcaggcgcttcttccaggtctcgatggggtcgccgagttcctccggagcgaggccgatcagcgcggcgtagcccggcgagacgaacatccggtcggtcaccaggtcccagtcccagagtccgtcgcgcaccgcttccagggcgcggttcaggcgctgctcgctgccgtgcagttcgtcgtaggcctgggccttgcggcggaactggcgtaccaggtagaggtacaggagcaggccggttgcggcgaagaagaacagccgcttggcggtcatccagaacaccagttggtcgtggtcctggacctggttttgtaacaaatgatcgctcaggaacgcccaggcgatggcgattgcgagataagccaggctcaggcgaagggcactcaggcgggggctcatgggattttcagtgggcaattattggccgggcagtataaatgatggccatccggccctgttcatatctaaaagaacggatggtaatccccagccgcttggtgataatgcccccaggttttgtcagacaaggccctcatcactcccaagtccccccgaggttcagtaccgcctatgtggttcaacggttttctcgacctgtcgccgtggcaactggtggcagttaccctggtgctgacgcatatcaccatcgtcagcgtgaccgtctacctgcatcgctattccgcccaccgtgcactcgacctgcaccccgcgctgcagcacttcttccgtttctggttgtggttgaccacagggatgaacacgcgcgaatggaccgcgatccaccgtaagcaccatgccaagtgcgagaccgtcgaggatccgcacagcccggtgcacaagggcctgttcaccgtcctgcgcgcaggcgcggagctgtacaaggccgaggcgaagaaccaggacaccctgcgcatctacggcaagaactgcccggacgactggatcgagcgcaatctctactcgcgcttcccgatcggcggcgtggtgctgatggcgctcatcgacctggccctgttcggcgcccttggcctgaccgtctgggccgtgcagatggtatggattccgttctgggccgccggcgtggtcaacggcctcggccacgcggtcggctatcgcaacttcgaatgccgcgacgctgccaccaacctggtgccctggggcatcctcatcggcggcgaagagctgcacaacaaccaccacacctacccgaactcggccaagctgtcggtgaagaagtgggaattcgacctgggctgggcctggatcaagctgttcagcttcctgcgcctggccagggtcgcccgggtcgcgccgatcgcccatcgggtcgagggcaagcacagcctggacatggacaccgccatggcgatcctcaacaaccgcttccagatcatggcgcagtaccgcaagctggtgatcgcgccgctggtcaagcaggaagtggccaaggccgacgagtcggtgcgccacctgttccgccgcgccaagcgcctgctgtcgcgcgagaccagcctgctgcaggaccgccaccacgtgcgcatcgactcgatgctcgcccacagccaggcgctgaaggtgatctacgagaagcgcctggcgttgcagcagatctgggccaagaccagcgccaacggccacgacatgctggcggcgatcaaggactgggtgcatgaggcggaagccagcggtatccagtcgctgaaggagttcgccgcgcaactgaagacctactcgctgcgtcccgcctgacgcctggcgcgccctcgcgggtgcgtcagccgcctctgcaacgcgccggctcctgccggcgcgttgcgtttcggcgtcgccagtgcgacgccccgccgatacttctcttcctccgcaagtcgacttgcccgatccgggattcagcccgggcggcgcccggcctatcttcggcgtgcccaggcgccacgccgggcgtcacgcagaacaacaagaaaaggagcgcgggcgatgttgctggattacctgatcatgctggtctacgccctggccatgctgggcctgggctggtacggaatgcgcaaggcgaagagccagagcgatttcctcgtcgccggacgccgcctcggccccggcctctacctgggaaccatggccgcggtggtgctcggcggcgcgtcgaccatcggtacggtcaagctcggctaccagttcggcctgtccggcttgtggctggtgttcatgctcggcctggggatcatcgtcctcagcctggtgttctcgcggcagatcgcgcgcctgcgggtgttcaccgtgacccaggtgctggagcagcgctaccaggcctcctcgcgcctgatcggcggggtggtcatggtcgcctacgacctgatggtggcggtcaccgcgaccatcgccatcggctcggtcaccgaggtggtattcggcatcccgcggatcccggcgatcctctgcggtggcgggatcgtcatcgtctattcggtgatcggcggcatgtggtcccttacgctgaccgacatcatccagttcgtgatcaagaccgtcggtatcttcctggtcctgctgccgttgtcgatcgacggcgccggtggcctggcgcgcatgcaggaggtgctgccggcgggcttcttcgacctcggccacatcggcctggataccatcctcacctacttcctcctgtacttcttcggcgcgctgatcggccaggacatctggcagcgggtgttcaccgcgcgcagcgagacggtggtgcgctacgccgggcttggcgccggcgtctactgcatgctctacggcgccgcctgcgcgctgatcggcgcggcggcgcgggtcctcctgccggacctggcggtgccggagaacgcctacgccgagatcacccgcgaggtactggcgccgggcctgcgcggcctggtggtggcggccgcgctgtcggcgatcatgtccaccgccagcgggtgcctgctggcagcggccaccgtgctgcaggaagacatctacgcgcgcttcctgcgccccggtaccaccagcgacatccgtctgagccgttgcatcaccctgctgatgggcgtggcgatgctggtcctggcgtgcctggtcaacgatgtcatcgcggccctgagcatcgcctacaacctgctggtcggcggcctgctggtgccgatcgtcggcgcgctgctgtggcgtcgggccagtccgcagggagcgatcgccagcatcgtcgccggttgcctggcggtgatcgcctgcatggcccgcgacggcctgctcgccaactcgccgatcgtctacggcctgctggccagcctggcgaccttcgtcgcggtcagcctggctacccgtcctgccgccagcctgcgagcccagccggaatgaacccaccgcgccgggcggcgcccggcgctttcttcccgccacacggagacgccccatgtcgaacgaccatccgcagcccctcgacgccgccgagattccacgcttcgccggcatcccgaccttcatgcgcctgccggcgttcaccgacccggcggcgctgcaggtcggcctgatcggcgtgccctgggatggcggcaccaccaaccgcgccggtgcccgccatggcccgcgcgaggtgcgcaacctgtccagcctgatgcgcaaggtgcatcacgtcagccgcatcgcgccctacgacctggtgcgggtcggcgacctcggtgatgcgccggtgaatcccatcgacctgctcgattcgctgcgccgcatcgaaggcttctatcgccaggtccatgccgccggtaccctgccgctgtcggtcggtggcgaccacctggtgaccctgccgatctttcgcgccctgggtcgcgagcggccgctgggcatggtgcatttcgatgcgcattccgataccaacgaccgctacttcggcgacaacccctacacccacggcacgccattccgcagggccatcgaggaaggtctgctcgacccgctgcgcacggtgcagatcggcattcgcggctcggtgtattcgccggacgacgacgctttcgcccgcgagtgcggcatccgcgtgatccacatggaagagttcgtcgaactgggcgtcgaggcgaccctggccgaagcccggcgggtggtgggcgacgggccgacctatgtgagtttcgacgtcgacgtgctcgacccggccttcgcgcctggcaccggcaccccggagatcggcggcatgaccagcctccaggcccagcaactggtccgcggcctgcgcgggctggacctggtcggcgccgacgtggtggaagtctcgccgccgttcgatgtcggcggcgccacggcgctggtgggggcgaccataatgttcgaactgctctgcctgcttgccgagtcggccgcgcgaagcgcctgacggcgttccgccggcctggctttggcgctataacgaaggcggaccgaacgccatgggggcgggaatgctgggcaacctcaacgacatcgacctgcgcatgctgcgcaccttctgcgccatcgtcgaggccggcggcttcactgccgcccaggcgcgcctgaacaccagcctgtcgcgcctgagcgtgctggtgcgcgacttggaggtgcgcctgggctattccctgtgccggcgcggcaacggcggtttccagttgaccgaggaggggcaggagctctacgacgccgcgctcggcctgttcagcgacatcgcccgtttccgcgagcaggtccgcggcctcggcgggcgcgatcgcgaggcgttgcacctgggctgcgtcgatggcgtcatcggccagcattgcctgccgttgccgctggccattcggctgtttcgccagcgcgccccggaggtgctgctcaagctgcacacgcggcgtcccgacgaactcgagcacgcggtgctggaagagcgcctgcaactggcggtgggggcctttcaccaccggttgtccgggctctactaccaacccctgttccgcgaggagcagaacctctattgcggcagcgcgcaccccttcttcgcccgggcggacgacgagccgacactggacgagatctgcgccgccgactatgtcggccgcggctacatggcggaaaaccatcgcccgcacgacctgcgcttcaaccagggaaccgacgcctacaccatggaggccatcgctaccctggtcttcagcggcacctacatcggctacctgccgacgcactatgccgccacctgggtcgccgaagggcgcatgcgggcgatccggccacggcaactggcctacgactcggaattccattgcattacccgccagggacacgaagaacgaccgaccctgaccctgttcctgcgctcgctgttcgaggcgcagaaacaattgggcgtgcaggctccggcgaatacgaacggcatcgctcggcaattgtgatcgagcgcactggctggagcctttccctgccgttcggcgggcatttctgtatcgccgcgacccctgcgctaagttggcggtcgaacccgttccgcgagcagagcgacgatccatggacgacctaaccggcattcccgaagacccgcaggaggccgcgctggccttgctgcacagccgtgccgaagtggcccggctgaaggagcgcgagcaactcttcagcgccttgctggccagcgtcaactcggtgctctgggcctacgactggcagaaccggcgaatggtctacgtcagtcccgcctacgagaaaatcttcggccgttccgcggcgctgctgctggcggactacgaggaatggcgcaacagcatctacccggacgacctcgactacgccgacagcagcctgctgcaggtgctcgaacgtggcgccgtggaacaacgcgaataccgcatcgtgcgtggcgacggcgaggtccgctggctcaacgacaagtgcttcgtcagccgccagggcgaggcgggactgccgctgatggtggtgggcatcgccgaggacatcaccgacaagaagcacatggagagcgagctgcaacggctggctaccaccgacgtgctgacccagagcagcaaccgtcgctatttcttcgacagtgccgaggcggccttcaaggagtgtcgccgcgaggggataccgttggcgttcctgctgctggacgtcgatgacttcaagaagatcaacgaccgcttcggccaccaggtcggcgaccaggtcctccagcgtatcgcccagagcggcagtgccgcgctgcgccgtggcgacctgttcgggcggatcggcggcgaggagttcgcggtgctgctgcccggctgcgacgagcagaccgcgcgacagatcggcgaacgcctgcagcgcgaggtgcaacgcctgcgcttccaggagggcgagcacagcttcgggatcaccgtcagccagggcctgacggtcctccaggccgatgacgagggactcggtgccctctacagccgggccgacgccgcgatgtactcggccaagcgccagggcaaggactgcatcgtcgtgggctgaccgctgggcaaacgtttccgttttgtcgacggcgccacggaatacctctttggggaggcgaccggcaggtcgcggctgcggtacaatattccttaaagctattaaatatgaataattaattctttttaggtttattgcggatattttactgtttattacccacgcgctataaagcgcgggaaataacgatttctgaaacgtggcggtaactcgccagaaaggaagctgtaataggcggttttctgccgacacccttcggcccgtcagccgggagaagggcaggaagcccgagaggacgcgaaggcggagcccgatggaaagattggcttacaaattgccttcactggcggtgggtcgagacacccgccgcacaataacaagacacgagtacgcccatgcacacgcttccgttcgctgcctccctgcctgcttgcctgccccgtcgttccatcgtcgcgggttgcgccgtttcctgatccatcgaatgccgagtttcgcgcgcgccatcttccgggatggtacggcgctcagtgtttcaacgaccggtcgggcccacgcgttccacttcccccgaccggaagacaattagcaataccaatggggaaaagaccaatgaagagtcgcaagatcaacaagtcacgactggccctggccatcactgccggtaccctcggtgccctggcgcaacaggcggtcgccgccggtttcatcgaggacagcaaggcatcgctgaccctgcgcaacttctacatcaataccgacaaccgcaatggcaccgcctcgccgagcaagcaggaagagtggggccagggcttcatcctgaattaccagtcgggcttcacccagggcaccgtcggcttcggcgtcgacgcgctgggcctgctcggcgtgcgcctggacggcggcggccgtgccggcaagagcggcctggaccgccagccgggcaccgtgttcccgctggaaagcaacggcgagccggtgcacgacttcgccagcctgggcctgaccgccaaggccaaggtgtccaacaccgagttccgctacggcaccctgcagccgaagctgccggtggtcacctacaacgacggccgcctgctgccggtcaccttcgagggcggccaggtcacctcgaccgacctcaaggacttcaccctggttgccggccaactggagcactccaagggccgtaactccaccgacaaccgcagcctgagcatcgccggcgccaacggcagcagcgccagttcgcgcgacagcaacaagttctactacgcgggtggcgactacaaggtcaacaaggacctgaccctgcagtactactacggcaacctggacgacttctacaagcagcacttcctcggcctgatccataactggcagattggcccgggcgtcctgaagaccgacctgcgcgccttcgacagcagctccgacggcaagaacggcagccgttccggccgtgccgacggctacgtcagcagcggctactacggcagcggcgtgaccaagggcgaagtcgacaaccgcgccttcagcggcctcttcacctataccgtcagcggccacagcatcggcgccggctaccagatcctcaacggcgacagtgacttcccgttcctgaaccgtggcgatggcgaaggttctaccgcgtacctgatcaccgacgtgcagatcggcaagttccagcgtgccggcgagcgcacctggcaggtccgctacggctacgacttcgccaccgtcggcgtgccgggcctgaccttcaacaccatttacctgagcggcgacaagatcaagaccgcccgcggcgaccagagcgagtgggaacgcgatatctccctggcctacgtgatcccggacggcaccttcaagggcctgggcttcacctggaagaacgcctccttccgcagcggcctgccggctgccggttcgagcaacaaccagcgcgaccaggacgagaaccgcctgatcgtcagctacaccctgccgctgctgtaagctccggccggacaggaaaaagcccgcgtcctcctggaggacgcgggcttttttcattcatggcgccactcggcgtgccgggccggccagggcgaacagcgccgcggctggccatccgccctgcgggatgcccgtcaggccttgcgcggcgccggttgctgctgggtgatgcaatggatgttgccgccgccgaggaggatctcgcgccccgggaccatcaccacctcgtgctcggggaacacgcgctggaggatcgccctggcctcggcgtccttgggatcgtcgaagctcggcgcgatgatgccgccgttgacgatcaggaagttcacgtaggagccggccaggcgaatggagggatcgcgcggctggctgccctcgacgatatccacgccgtcgcactcttcctgggtcgcgtacagcgggccggggatcggcatcttgtgtaccaccagcttgcgtcccttggcgtcgcggctttcttccagcacgcggagggcggcctggcagcgcaggtagttcgggtcgtcctggtcgtcggtccaggccagcagcacctcgccgggacgcacgtagcagcagaagttgtcgacgtggccgtcggtctcgtcgttgtagaggccgttcggcagccagatgatgctctccaccgcaaggtagtcgcgcagggtccgctcgatctccgcctggctcaggtgcgggttgcggttgtggttgagcaggcattcctcggtggtgatcagcgtgccttcgccgtcgacgtggatcgagccgccctcgaggacgaagtcgtcggtgcggtagcgggcgcgccgttcgatctcgaggatcttgcgtgccacctggtcgtcgcgctgccaggggaagtacaggccgccttcgaagccgccccaggcgttgaagccccagtcgacgccgcgtacatcgcccttgtcgtcgatgacgaaggtcgggccggtgtcgcggacccaggcatcgtcgctgctgatttccacgacgcggatgttgccgtcgtcgaggcgtgcgcgcgcgttctcgtactgcccggcgctggcgcagacggtgaccggctcgaagcgcgcgatggccttggccaccgcggcgaaggccgcctgggccggcttgccgccgttgcgccagttgtccgggcgttccggccagaccatccaggtctgctcgtggggttcccattcggcgggcatgcggaagccgtcggcgcgtggggtgctggtcgggttgctcatcgctgctcctgaaatcgttgctatgcgcggcggacgccggcgcggaatgcgcggggcgtccccgcgcggatcgtttcccgaggcctcacgactccagcgaaccgtccagggtcttcagcggaccgtagaggttcggccggcggtcgcggaacacgccccaggcgctgcgggtgcgctccagcgcatcgaggtcgaaggtgtggacaaggataccttcctcggtgcggttcagctcctcgactttctcgccgaacgggtcggcgatgaacgaagaaccatagaaggtgatgtcgtagccatcctgctcctcgcggccgatgcgattggaagccaccagcggcatcaggttggctccggcatggccttgctgcacgcgctgccagtgatcgcgcgagctgatgctggcgtcgtgcggttcgctaccgatggcggtcgggtagaacaggagttccgcgccgagcaaggccatgctgcgcgccgattcggggaaccactggtcccagcagataccgacgccgatccgtgcgtagcgggtctgccagaccttgaagccggtgtcgcccggattgaagtagtacttctcgtggtagcccgggccgtccgggatgtggctcttgcggtagaccccgaggttgccgccatcggcgtcgatgaccgcgatgctgttgaagcgggcgcgcccggcgcgttcgaagaagctgatcggcaataccacctgcaactcccgggcgagggcctggaagtgggcgatggcggcgttctcctcgaccgtggtggccagctgcaggtagtccgggttcggcttctggcagaagtagggggtctcgaacagttcctggatcaggatgatctgcgcacccctggcggcggcctggcgcaccagtttctcggcgcgggcgatgttcgccggacgatcccaggagcaggccatctgggtggcggcgacggtgacgttgcgggtcatggagcacctcgtgtgctggctcggatggctgccgggcttggcggcggccggttgtgggtcgggcgggcgggaacggggtgtcgcgcccgatcgagtgatgggcggatttatatccgataaaaatcggactgtgaagcggtttaagagggtattatggattttctatcgatttaaatcggatataaatccggataatggttcgctacgcttttccaggatcggcggcaggtagagccccaggtaggcgtcgaacacccgcatgccttcttccgccaggcgtgcgtcgatgatcccgtgacgctggaccgacaatgcgtagacgcgatcgcctagctccatggccaggctgaagatctcgatatcggtcggcagcggtggcagcaggaaatgccgctcgaacagggcgcgcatggcctggccgagttgcacgtcatgctggcgatcggcctgggtgacttcggccaggccgtggctggcgagaatcagttggcgggccgccgcgtcgcgggcgtagaccgccagcatgcgctcctcgacgatccgcgacaggtcgcgccagcagcgcaggcctgcatggtccaccggctgttcgaggcacgcgcggaaggcggcgtggacctcgccggtcagcccctggagcagggccggcacgctggggaagaagtggtagaccgacgatggcggcatttccgcgcgttcggccacgctatagatggtcaggccgccgatgccttcgtcggcgagcaggccgcgggcggcgtcgaggatcgcggcgatccgggcctggctgctggcgcggggcttgcgggtggacgaggtgggctgcatggcgggtctccgggcgtgagcggctattggacgccagctcacgcgaccggggcaagccgctcagtggctggcgccgcggaaggccttccagatctcgtcgaccaccggccggagtttttccggcggcgtttccagggcgaacaggcggcggctggtgtcgcggtccggatacaggccgggttgctggcgcagggcgggatcgaggaagccggcggcgtcggcgttgccgctggggtagagggtggcggcggtgatctgtgcggcgatcttcggttgcatcaggtagtcgatgaaacggtgcgcctcgcgtggatgctgggcgccggccgggatcaccaggttgtcgatgaacagcaccgagccttcctgcggtacctcgaaacttaccggctggcccgccttggccgcgcgcagggcgtcgccgacccaggccatggccaggcagaggcgaccgccttcgaggtcggcgatgtagcgctcgctgtcgacgtagcgcaggttcggtcgcagtccgtgcagcgcctcggcggcgcggcgtacctggctcggcgcagtacgaccgaggttgcggccctggtagttgaggaggatcgccagggtttcgtccggcgcgtccagcaggctgatgccgcagcttttcaggcgctggctctggctggcgtcgaacagcaggctccagctgttgggcagcggcccgccataggcggcttcggcctgcggggtattgatggccaggcctacggcaccccatagataggggacggcgtggcgattgtcaggatcgaccgcggccagtttgctcagcaattgacggtcgagatggctgcggttgggcagctgggtgaagtccagcggccgcagcaggttgtccttcagcagggccggcagggtgtcgtgggaggggacggcgacgtcgatcgcctcgccactgcgcagcgccttgtccagttcctcggcggtggcgaaggtgtggtactcgacgcggatgccggtgtccttctggaaggactcgagcacctgtgggtcgatgtagtcgttccagttgtagacgcgcagggtctcctcggcctgggccagccagggtgcgagggcgaggaacagcagggcggaaaggcggggcatggaatcttctcgctggacggaacggagcggacgatggtgccggagccaggcggcagaggcattgatgcaggccagcatcgagtctggcgggaggcgtggcggcaggctgtgccgtggcgcacatttcccggttccgagaaaaggaccggggcggtttcccagacacagacgcccccgcgttgagtgtctgcgaaaccgccccggatttcgctgcgtacggcgccggcccaggaccggcgcgccgataccgctacctcagacggtatgcaggtaccagttgtactcgaggtcggagatcgagtgctcgaactcctccagctcgctttccttgcaggcgacgaagatgtcgatgtacttcgggtcgatgtacttcgccatgatctcgctttcgtccagctcgcgcagggcgtcgcgcaggttgttcggcaggctcggctccatctgctcgtaggagttgccttcgatcggcgcgcccggctcgaccttgttggtcagcccgtgatgaacgcctgccagcaccgctgccagtagcaggtaggggttggcgtcggcgccggccacgcggtgttccaggcgtaccgcgtccgggctgccggtgggcacgcgcagggccacggtgcggttgtccaggccccagctcggcgcgttcggcacgtagaactgcgaaccgaagcggcggtaggagttgacgttcgggcagaggaaggccatggaggccggcagggtctcgagcacaccgccgatcgcatggcgcaatgcggcgttctgctcgggatcctcgctggtgaagatgttgttgccatgcttgtcgagcagcgagatatgcacgtgcagtccgttcccggcctggcccggatagggcttggccatgaaggtggtgtccatctcgtggtcgtaggcgatgttcttgaccaggcgcttgagcagcaccgcgtggtcgcaggccttgagggcgtcgttgacgtggttgaggttgacctcgaactgcgccggtgcggattcggcgacgatggcgtcggccgggatgccctgggcgcgggcgccgtcgatgatgtcctggaggcactcgacgtattcgtcgaggtcgtcgatggagtacacctgcaccgactgcggacgcttgccggagatcggcgagcgcggcggctgcggccggccgttcacattctcctggtcgatcaggtagaactccagctcgaaggcggcgacgatggtcagttccatctcggtgaacctggccaccacctggcgcaggacttcgcgggggtcggcgaagaagggatcaccttccagctcatgcatggtcatcagcagttgtgcggtcgggcgcttctgccagggttccatggagagggtgccggggatcgggtagcagatccggtcggcgtcgccgatgtcgagacccaggccggtactctctacggtggagccggtgatatcgagggcgaacagggaagcggggagattgatacctttttcgaagactttgttcagactgttgcgttcgatccgcttgccgcgaaccacgccattcatgtctgcaataaggaggtcgacgaactggacctcgggatgttccttgaggaactcgctcggttcagtgagctgaacggcacgctggggtaccgacatgatgcaacaccttttttgttaaaaatttcaatcatgcggggggtaggctatgagtcaatccgaaagcctgtgggatgtcaatagccgccaaaaacgccctcttgtggggcgttgaggccgttttcagggcattttcgccggacgaaaagccgaaaaaaacctcgcgtcgaagggtgttcaggagtgcgtgttcaattttttacaggcctattgtgtaaaaaaatgaacaacgctaagctcggccaaaccccataacatctacaaacaacgggtgtctcatgtctcgcctgccgttaatcggcgtcaccgcctgcaccaagcagatcggtcttcatccctaccacattgccggcgacaaatatctgcgtgccgtcgtcaacggcgctggcggtctcccgctgatcattcctgcgctgggcgagtcgatcgaccaggcagccctgctggacagcgtcgacggcttgctcttcactggctcgccgtcgaacgtcgagccccgtcattatagtggaccggcgagcgagcccggcaccctccacgactccgaccgcgacgccaccacgctgccgctggtccgcgccgccatcgacgccggcattccggtcctcggcatctgccgcggtttccaggaaatgaacgtggctttcggcggcagcctgcaccagaaggtgcacgaggtcggaaccttcatggaccaccgcgagccggccgaccagccgctcgaggttcagtacgcgccgcgccatgccatgcatgtgcagccgggcggagtgctcgccggtatcggcttgccgagcgagttccaggtcaattccatccatggccagggcgttgatcgtctggcgccgggccttcgagtagaagcactggcgcctgacgggttggtcgaagccatctccgtagaaggtgcaaaagccttcgctcttggtgtgcaatggcacccggagtggcaggttctgacgaaccccaactatctcgctatcttccaggctttcggtaaggcctgcagcaagagggcggggcaacgttgagtccggctgttggggccggactctcaaccctgaggtctttatgactaccaagttagaccagctgaccagctggctgaaggaacgcaagatcaccgaagtggaatgcctgatttccgatctgacaggcatcgcccgcggcaagatctcgccgaccaacaaattcatcgcggaaaagggcatgcgcctgccggagagcgttctgctgcagaccgtcaccggcgactacgtggaagacgacatttactacgacctgctcgacccggccgacatcgatatggtctgccgcccggacgagaatgccgtgttcctcgtcccctgggccatcgagcccaccgcgatggtgatccacgacaccttcgacaagctcggcaatcccatcgagctgtcgccgcgcaacatcctcaagcgcgtgttgaagatgtatgccgacaagggctggcggccgatcgtggcgccagagatggagttctacctgaccaagcgcagcgacgaccccgactatccgttgcaggccccggtgggccgctccggacgccaggaaaccgggcgtcagtcgttctccatcgacgccgccaacgagttcgacccgctgttcgaggacatgtacgactggtgcgaggcccagggccttgacctggatacgctgatccacgaggaaggcaccgcgcagatggagatcaacttccgtcatggcgacgccctcgacctggccgaccagatcctggtgttcaagcgcaccatgcgcgaggccgcgctcaagcacaacgtcgccgcgaccttcatggccaagccgatgaccggcgagccgggcagcgcgatgcacctgcaccagagcatcgtcgacgtgaagaccggcaagaacatcttctccaatgccgacggcaccatgagcgagctgttcctgcaccatatcggcggcctgcagaagttcatcccggaagtgctgccgctgttcgcgcccaacgtgaactcgttccgccgcttcctgcccgatacctcggcgccggtgaacgtcgagtggggcgaagagaaccgtaccgtcggcctgcgcgtgccggactccagcccggagaaccgccgggtcgagaaccgtctcgccggcgccgacgccaacccttacctggcgctggctgccagcctgctgtgcggctacatcggcatggtcgaaggcatcaagccgagcgcccaggtcaaaggtcgcggctatgaacgccgcaacctgcgcctgccgctgacgatcgaagcggcgctggagcgcatggagaactgcaagcccctcgagcagtatctcggcagcaagttcatcagcggctacgtcgcggtgaagcgtgcggagcacgagaatttcaagcgggtaatcagctcctgggagcgggaattcctcctgctttccgtttgatcctgaccgggggcggccggcgtggtccgccgctcccggacagtcttgaatagaagaggtgtgacatgaacagccaaatcaccaacgccaagacccgtgagtggcaggcgttgagccgcgaccaccatctgccgccgttcaccgactacaagcagttgaacgagaagggcgcgcggatcatcaccaaggccgaaggcgtctatatctgggacagcgagggcaacaagatcctcgatgcgatggccggcctctggtgcgtcaacgtcggctacggccgcgaggagttggtccaggccgccacccggcagatgcgcgagttgccgttctacaacctgttcttccagaccgcccacccgccggtggtcgagctggccaaggcgatcgccgacgtcgctccggaaggcatgaaccacgtgttcttcaccggctccggctccgaggccaacgacaccgtgctgcgtatggtccgacactattgggcgaccaagggccagccgcagaagaaagtggtgatcggccgctggaacggctaccacggctccaccgtcgccggcgtcagcctgggcggcatgaaggcgttgcatgagcagggtgatttccccatcccgggcatcgtccacatcgcccagccctactggtacggcgagggcggtgacatgtcgccggacgagttcggcgtctgggccgccgagcagctggagaagaagattctcgaagtgggcgaggaaaacgtcgccgccttcatcgccgagccgatccagggcgccggcggcgtgatcgtcccgccggacacctactggccgaagatccgcgagatcctcgccaagtacgacatcctgttcatcgccgacgaagtgatctgcggcttcggccgtaccggcgagtggttcggcagccagtactacggcaacgccccggacctgatgccgatcgccaagggcctcacctccggctacatccccatgggcggggtggtggtgcgcgacgagatcgtcgaagtgctcaaccagggcggcgagttctaccacggcttcacctattccggtcacccggtggcggccgccgtggccctggagaacatccgcatcctgcgcgaagagaagatcatcgagaaggtgaaggcggaaacggcaccgtatttgcagaaacgctggcaggagctggccgaccacccgttggtgggcgaagcgcgcggggtcggcatggtcgccgccctggagctggtcaagaacaagaagacccgcgagcgtttcaccgacaagggcgtcgggatgctgtgccgggaacattgtttccgcaacggtttgatcatgcgcgcggtgggcgacactatgattatctcgccgccgctggtgatcgatccgtcgcagatcgatgagttgatcaccctggcgcgcaagtgcctcgatcagaccgccgccgccgtcctggcttgagtccctgagcggacttttgccagactgcgccagtgcgttggccaggctcaccgggtggtgacgcgatcggttgcgccaccgcccggatacttcaacaaaaatggagctaccccgcatgatgaaacgtttcggtaagaccctgctcgccctgaccttggcgggctctgtggccggtatggcgcaggctgcggacaacaaggtgctgcacgtgtacaactggtccgactacatcgcgccggacaccctggagaagttcaccaaggaaactgggatcaaggtcgtctacgacgtctacgacagcaacgaagtgctggaagccaagttgctggcgggcaagtccgggtacgacgtggtggtgccgtccaactccttcctcgccaagcagatcaaggccggggtctaccagaaactcgacaagtccaagctgccgaactggaagaacctgaacaaggacctgatgcacaccctggaagtcagcgacccgggcaacgagcatgcgattccctacatgtggggcaccatcggcatcggctacaacccggacaaggtcaaggcggccttcggcgacaacgcgccggtggattcctgggacctggtattcaagccggagaacatccagaagctgaagcagtgcggcgtcagcttcctcgactcgccgaccgagatcctcccggcggccctgcattatctcggctacaagccggacaccgacaatcccaaggaactcaaggcggccgaagagctgttcctgaagatccgtccctacgtcacctacttccactcgtcgaagtacatttccgacctggccaacggcaacatctgcgtcgccatcggctactccggcgacatctaccaggccaagtcccgcgccgaagaggcgaagaacaaggtcaccgtcaagtacaacattcccaaggaaggcgccggcagcttcttcgacatggtcgccattccgaaggacgccgagaacaccgagggcgccctggcctttgtcaacttcctgatgaagccggaaatcatggccgagatcaccgacgtggttcagttccccaacggcaacgcggcggccaccccgctggtgtccgaggcgatccgcaacgacccgggcatctacccgagcgaagaggtcatgaagaagctgtataccttccccgacctgccggccaagacccagcgggcgatgacccgcagctggaccaagatcaagtccggcaagtgatccgcgaggagcccggcggcgcctgaagccgccggcgctccggcacgagagaaccggaacgcggccgggtttcctccggccacgctcccctgcgaagaggttcgactcttttgcccgttcgtccagacgcttcctcctgggggcccgacgaccggacgcagtatcgacgacgaagacgctgccatgggcgctgcgccaatctgccgcgccggggccggtcgtgtcgctcgcaccggggccgagggcccggaaaacctgaaaccaacacgccggtagggaacccagctcactcatgtttcccggcggaatcgtcgggttgtcatgaaacccgagtgatctgggcttacatcggcacttgaagaacacgggtcgaacaggcagggtgctgccgtgaaaaggcccggaacaggagtcggacatgcaacattccattggcaagacactgctggtagccgctctggctacggcgatcgcgggccccgtgcaggcggagaagaagagcctgcacatctataactggaccgattacatcgctcccaccaccctcaaggacttcaccaaggagagcgggatcgacgtcagctacgacgtcttcgactccaacgagaccctcgagggcaagctggtctccggccactccggctatgacatcgtggtgccttcgaacaacttcctcggcaagcagatccaggccggtgccttccagaagctggacaagagcaagctgccgaactggaagaacctcgatccggcgctgctcaagcaactggaggtcagcgacccgggcaaccagtacgcggttccctacctgtggggcaccaacggcatcggttacaacgtggccaaggtcaaggaagtcctcggtgaccagccgatcgactcctgggccatcctcttcgagccggagaacatgaagaagctcgccaagtgcggcgtggccttcatggacagcggcgacgagatgctgcccgccgccctcaactacctggggctggaccccaacacccacgacccgaaggactacaagaaggccgaggaagtcctgaccaaggttcgcccctacgtcagctacttccactcctccaagtacatctccgacctggccaacggcaacatctgcgtcgccttcggctattccggggacgtcttccaggccgctgcccgcgccgaagaggccggcaagggcatcgacatccagtacgtgattcccaaggaaggcgccaacctgtggttcgacctgatggcgattcccgccgatgccaaggccgccgataacgcctacgcgttcatcgactacctgctgcgtccggaggtgatcgccaaggtcagcgactacgtcggctacgccaacgcgataccgggggcccgcccgctgatggacaagagcgtcagcgacagcgaggaggtgtatccgccgcaggccgtgctcgacaagctctacgtttccgccgtgttgccggccaaggtgctgcgcctgcagacccgtacctggacccggatcaagaccggcaaataagttcaaattccgcccggtagcgtgaccgggctcaacgacttgggagttgtggtaatggcgatagcctccggtgcctacaagaaagccctagagggcaaccagcagccgaaagaggtgctggtaaagatcgaccgggtaaccaagcagttcgacgagacgctggcggtggacaccgtgtccctgaccatcaacaagggcgagatcttcgccctgctcggcggctccggttcgggtaaatccaccctgttgcgcatgctcgccggtttcgagcggcccaccgaggggcggatcttcctcgatggccaggacatcaccgacctgccgccctacgagcggccgatcaacatgatgttccagtcctatgcgctgttcccgcacatgagcgtggcgcagaacatcgccttcggcctcaagcaggacggcctgcccaaggccgagatcgacgagcgcgtggccgagatgctcaagctggtgcacatgacccagtacgccaagcgcaagccgcaccagctctccggcggccagcgccagcgggtggccctggcccgttcgctggccaagcggccgaagctgctgctgctcgacgagccgatgggcgcgctggacaagaagctgcgctcgcagatgcaactggaactggtggagatcatcgagcgcgtcggcgtgacctgcgtgatggtgacccacgaccaggaagaggccatgaccatggcccagcgcatcgccatcatgcacctgggctgcatcgagcagatcggcagcccgatggacatctacgagaccccggcgagccgcctggtctgcgagttcatcggcaacgtcaacctgttcgacggcgtgctggtggaggacgtgcaggaccatgcggtgatcgcctgtccgcagctggagaacccgatctacatcggccacggcatcagcacccgcgccgaggacaagcgcatcacctacgcgctgcggccggagaaagtgatgatcagcgcgcagaagccggacaacctggaacacgccgggcacaactgggcccagggcaccgtctacgacatcgcctaccttggcggccactcggtgtactacatcaagctggcctccgggatgatcgtccaggccttcatggccaacgccgagcgccacgtcgcccggccgacctgggaccagtcggtgtacatcagctggtacgacgatagcggcgtggtactgcagtcatgaaattcgccaacagcctgaaaaagcgcatgcccaccgggcggcatgcggtcatcggggtgccgttcctgtggctcttcctgttcttcctgctgcccttcgccatcgtgctgaagatcagcctggcggaagcggacgtggccatcccgccctacaccgagatcttcgcctacgcggaccagcagttgcaggtgctcctcaacctcggcaactacctgatgctgaccgatgacccgctctacatcgatgcctacctcggctcgctgaagatggccttcatcagtaccctgatctgcctgctggtgggctacccgatggcctacgccatcgcccgctccagccagtcctcgcagaccgtcctgctgctgctgatcatgatgccgacctggacggcgatcctgatccgggtctatgcctggatgggcatcctttccaacaacggcctgctcaacagcgtactgatggggctggggctcatcagcgagccgctgaccatcctcaataccaacatcgcggtgtacatcggcatcgtctattcctacctgccgttcatgatcctgccgctctacgccaacctggtgaagcacgacccgagcctgctggaggccgcttccgacctgggcgcgcgtaacttcaccagcttctggaagatcaccgtgccgctgtcgaagaacggcatcatcgccggctgcatgctggtgttcatcccggcggtgggcgagttcgtcatcccggaactgctcggcggccccgagaccctgatgatcggcaaggtgctctggcaggagttcttcaacaaccgcgactggccggtggcgtccgccctggcggtggtaatgctggcgatcctgatcatcccgatcatcctgttcaacaagaaccaggccaaagaactggagggcaaggtatgagccagcacagcgtatcccgctccgtatcccgttcaacaggctctccatccagaagcgtggccaaagaactggagggcaaggtatgaagcgctggaatttctccaacgtcatgctgatcgtcggcctgctcttcatctacctgccgatgctgatcctggtgatctattcgttcaacgcctccaagctggtgacggtgtggggcggctggtcggtgaagtggtacgtcggcctgctggacaacacccaactggtcagttcggtcggacgctccctggagatcgccttctatacggcgttctcctcggtgctcctcggcaccctggcggccttcgtcctcacccgcatcccgcgcttccgcggtcgtacgctgttcggcggcatggtcaccgcgccgctggtgatgccggaagtgatcaccggtctgtcgctgctgctgttgttcgtggccatggcgcaactgatcggctggccgcaggaacggggtatcgtgaccatctggatcgcccacaccagcttctgctcgtcctacgtggcggtggtggtgtcggcgcgcctgcgtgaactcgacctgtcgatcgaggaagcggcgatggacctgggcgccaagccctggaaggtgttcctgctgatcaccatcccgatgatcgcgccctcgctggcggcgggcggcatgatgtctttcgccctgtcgctggacgacctggtactggccagcttcgtctccggacccggctcgaccaccttgccgatggaagtgttctcggcggtacgcctgggcgtgaagccggagatcaacgcggtggccagcctgatcctgctgagcgtttcgctgttcaccttcttcgcctggtacttcacccgccaggccgaggagcggcgtcgccgggcgatccagcaggcgatggaagagaccgcgaccgactggcagaaaggctcgccgaccccggcctgagccctccgccgaaaagaaaaggccacctgcgggtggcctttttcattggcgcgtcggtggcaggaaatgcctggctacgctccgtagggcgacgcccgaggcgttatccgccgatacccgttgtacccggcggacaaccaccatgcggctactcgcccgaccccacgccggccggctcagcgcttcggctccagcaccagcacgcccttgctgttcgccttcacctcgttttcctcatagtgctgcggcaggtagtggccctcgatgtaggcctcggcctggtcgtcgtagtggccgtcgaagggcacgccgctctgcccgaccgggttgatgccgaggctgtgggtcgggtcggcgaagtccaccaggcgccgggtcgatgggccgtaggtgaccgcccagggggccgggccgatcttcgccgacagattgttcggtacctcgtgggtgccgggggcggcgaacggaccgacgttgagaaggcgcctgagcagcgcttgctggcccagggcgtgctcgtgggtcagggtatgcgccttgccccacagccagccggacgggtcgttgccgagggtgccgcgcagatgcgcgagggaggcgttccaggcggtcctgacgatatccgcgcgggtttcccggcgttctgtgcggcggtcgtcccaccagggcgagtcggcgtcgccagccagccgaggcagcgcgctgtcgatggcgcgggtggcgatcaggctgtcgaagaaggcatcgcccagttcgtcgtgcaaggcgccctcggcaatctggaacagcaactggttgaacagcgtggcggcggtcgagtcgaccgggtagtcgccgttccaggccgccagttgctcgaccaggcgcttgccttcggcgtcgtcgaccacctcgcgcaggaccggcagcaagggtgcgagcaggcgtggcgcgtagccggtgcgattgccgagttgcagcgcgcggctgttgtccaggttccatttggtgccgcggtcggccagttgggtatccagccactggccgcggtccgccaggttgtagtagccgggaatcggccggccattggccgggaccggctggaagttggcggagacgatgtagccgcgcgccgggttttcctcctgtgggttgtcggcgaacggatagaagccggacttgtccgcctcgcccttgctgccgtcgaggatgaagctcgggttcaccccctccggccgcttcggcagggccgccgaggcccaccagccgatatcgccggcggcgttggcccagaccaggttgagtcccggcgaatggatcttcgaggccgccgcgcgggccttggccagggtatcggcgcgattcagctggtagaaggcgtcgagcaccgggttctcggtctcgaggaaagcccaccacatggcgatcggggtcttgccagagctggcgccgagcgcgtcgttgacgatcggaccgtggggcgagcggcgcagggtgagcttcaccggcgcagcgcccttgaccgcgatttcctgctcctcgctctgcaggtcgacccattcgccctggtaccagacctggttggggttgtccgggttgaccttctcggcgaccaggtcgaggtcgtcgttctggaacatcgtcaggctccagccgaacgcacggttgtggcccagcgaggcgaaggggttgagcgcctggtggtggccatagagttcgaagccgggcgcgctcagctgggcctcgtaccataccgccggcgcggcgaagcggatatgcgggtcgccggccagcaggggcttgccgctggcggtgcggctgccggcgacgacccaggcgttgctgccctcgaactgcggcaggccggcgtcctccagggcctgctggctgagacgggcgagggcgccgaggtccttccagtcgccggcgcccagtgcgccggagggcgtcagcacgccctgcggatgccagtcgagatcgaagatgcgcaggtagtcgctgcccagttcgtcgcggatgtaggtcagcaccggctcggtgcggaaggcggcggcgaagctgtaggccatgtagccggcgatgctcagggtatcttcgggggtgaagggacgcctgggtatgcccagcagatcgaattcgagcggcgccgggttgttctcctggaactggttgaccccgtccaggtaggcctccagcactttccagggctgcgactgcttgtcctggcgggcgctgtattcggcggcgtggtcgcggatgcgcagggtgcggaacagacggtcggtatccaccagcttgggtccgagcacttcggccagctcgccgcgcgccaggcgccgcagcatttccatctggaacaggcggtcctgggcgtgcacgtagccgagggcgcggtagaggtcggtctggttctgcgcatacaggtgcggaaccccgcgctcgtcgtagcgcacgtcgaccggcgcctgcaggtgggccagggcgagcgagccgttgcggagcggctgcttggcatggaggtaccaggcgccgccggcagccgcggcggcgaccgccacggcgatcacggtcagggtgcgtttcatcgatcctttctccttgttgtagtgccgagcattctgcggatgccgccggcccgcggcattgaccgaatgctcggaccctggaagtctttggtcaatcgcgaggagccgccatgcaggacgacccgtctaccagccccctgacccattccgccacgttgcggcgtctgttgtatgaagccctggacgccctcgggctcgaccccacccgcgtctaccgcagcgtctaccggcgtatcccgctgccgccgccgaccctgggcggccgcctggtgcatgacaacgccccgttgttctggaccgagctggcggcggtgaccggcgatgccgacatcggcctgcacctgggcgaggcaatgaagccgcgcctgctcgatgtggtcggctacctgctgctgtccgcgcgcgacctggaggaggcgctgcgcagcttcgtgcgtttccagcacattctctccggcggtttcgccgcgcgcctcgaggtcgaaggggaaacggcaaggctgatcctcgacatcaactacctgggctatgcctcgctgcgccagcagatcgaatgcctgatgctgctgttcctcaagctgctggcgctgatcagcgacgacgagttcgtcgccgagtgcatcgaattccgccaccgagccccgccgcggctgggcgaacaccgccggttgttcggcaggctgccgctgttctcgcggccgcacgatgccctggtgttttccgccgccttgctgcggcgtccttcgcgcaacgccaatccggacatgcatgacgtgctgacccgccacgcggaagaacagtcccgcgaactcagcgagaaccgcttgctcaatcgcgtgcgctacctgatcgagctgcgcctcggggagggctatggcttgcgccagtgcgcggcggagctgggccttggcagcggtgccttgcagcgtgcgctggccgctgggggagcgagtttccggcaggttcgcgatgaggttcgccggcagcgggcgagcgagatgctgttggccggtcgcgccatccgcgaggtggccaaggcttgcgggttcgccgagctgtcgccgttctaccgggcctttcgccgctggcacgccgcgcccccggagcaatacagggcgcggctggcgaagcgggaagagggttactcgaccagcggtacctgacggccgatctccagggtggcgatggcgtcgagctggatctcgatctgcaggaagcgcatggcgcgcttgggcgagacgttcttggcgatgcgcttgacgtacttgtcgcgcagttccagacggtcctcctggaggtcgtcgacacgctcgatcagcttgctcgcctggtcgtcgctgacgttgccgctgttgtaggcctgggcgtagtcgagcaggagcttgagggtttccttgctgagcttgtccgactcggtgcggtaggtgttgtagatcggccagaacttctcgccttcctggtcggtgaggttcatgttggcctcgacgatgcgcttgcgcttgtagtcgacgtcggccaggtcgttctggatctgcgcctggtgctccttcatcagttccttgctgctgggctgagggtcgttctgggcggccatcagcggcaggctgacgagggcgagcagggcgagggtgggacgtagggacatgcagcgactccttggttcggcaacggcccctcgtgggccgacccgggcagtgtagccgctacgccttccggcgccccctccggaaggcccggtgttgagccaggtcagcctttttccggggtccaggggcagtagcaacccacggcgagggtatgggtggcatccaccggacgtccctgcagcagcgcttcgaggatcggttcgatgaagctgttgctggaggtgcataccgcgccctcgctataggggccgaagtaggccaggcggccgtcgcggtcccagatcgccacggccgggctggccggcaactgctcggaaccgggcagaccggcgagggggcgcagggcggccaggttgtccggcaggcggccctggctgccaggcttctgcaggacatggaactccacgcccttgccggcgaagcgttcgatcagctcgccgaggtgctgctggttgccgacgttgcaggggcaggccgggtcccagaaatgcaccaggcggatcgcccccggcccggccagctcggccggcaggcgcaggctgtcgccggagaacagggtggtctgctcgctgaacgggcggatgtagcggatctcgaaccaccagtaggcggcgagcaggccgccggcccagagcaggccgaccaggctgacgaggagcgtcttgcggcggggagtcatggcattcacatggaaaacgggtgccaagcttgccatgtgttcgcgcgcagctgaatatccctgggtttcgcccgtggcccggccacgaatcgattgcagcccggaaccgccgatgtcagaagccttcaaccccgattacctgcgccagcacctgcgacccttggccgcggccgaggcggacgccgccgtcctcgcctaccaggcctactacggcctggacctgcgctcccgccatccgcgcctgcaagcgcggctcggcagcatggcggtcgacgggcgccgcctggcggtgcaggcctggctgctgccggaagcgcgcggcagcctgttgctgatgcatggctattacgaccacatgggactgtatcggcacgtggtcgactgggcgctgggcatgggcttctcggtgctcgcctgcgacctgccggggcatggcctgtccgaaggcgagcgggccagcatccgcgacttcgccgaataccaggcggtgttcaagggcctgctgggccaggctgccgaactcgacctggcggcgccctggcacctctgcggacaaagcaccgggggggcgatcctgctggactacctgctgcacggcggcgaacgtcccgagctgggcgagacgattctcctggcgccgctggtgcgcccgcgcgcctggggctggtcgaagctcagctaccgcctgctgagccccttcgtcgactcgatcccgcggcgcttctcggagaactccagcgatccgcagttcctcgacttcctccgcgagcacgatccgttgcagccacgcaccctgccgaccgcctgggtcggcgcgctgacccgctgggtgccgcgcatcgagcgggcacctcggcgtgccctgagccccctggtggtgcagggcgagtccgacgagacggtggactggcgccatggcctgaaggtgctgcgggagaaattcgacgagccgcggatactgttgctggaagaggcgcgccatcacctggcgaacgaaagcgaggggctgcggcggcgctatttcgatttcctgagcgacgcgctgggggcctgagttccaggccccgcgtcgatcagggggcgaccgcctggtccaccgccaggccggctttcagcgcggccagggccgcctggtagtagctgcggccggccggcgactcggcgaagttcacgtactgggtgagttccgcatcggagagatcgcggtagacatacagcagggtgttctccaggtccgcgccgatctgctgcaccaggcgctggcgctggccttccagcaactggccggtctgtccgccgccaagcaggccggggaggcccggaagcatctggctgaggctgtcggcggcgaccccggccagggccaggctgacttccgcgccggcctctcgggccggaaggacctgggccaggcgcttcaccagggcccggcgtggctcgctggcggtctgccgcggcaggccgttgctgtgctggagcaactggtcgcggcgggtggcgagcacctcggcggcgaccaccttgcgccccagcggcgactcgaagaaattcagcgggctggcgctgtccggcaggttctcgcgcaggccgttgagggcgcgctggtcgacttcggccggggcgaagcggcgattgctgttgtccaccagggtctggtagagcgcgggcggcagcttgtcctggtagcgcttctgcgccgcgtccagggcatcgctgaaatgcgcgcgctggtcgggccagccagcggcctggtacaggcgttgataagggtcggccagggcgggcagaccaaccagcagtaaagcgaaggcgagcaaagcgcgcattgatactcctttggcggcgaaagcctcgtcgttcgggtggtgccgtccatggggcgctattgtcgacatgcggcggaccgcttgtcgagacaccggggcggcacgctacaatggacaatgcacatcaacgtcaatcatcccctcctgcatcgcatcgtcgatgaactggtcgaccagggctggtcgcaccagagcatcttcatgcctgagcgtctgaccaccagattggccgaagagtgccgcacccgtgcggtcgcgggcgacctgaccccggcggggatcggccgcggcgacggccaggtgatccgcgaaggcatccgcggcgacctcacgcaatggctggagcccggagaatccgaggcctgcgacgaatatctgggggtgatggacagcttgcgccaggcgctcaacgcctcgctgttcctcggcctcgaggatttcgagtgccacttcgcgctgtacccgccgggcgcctattaccagaagcatgtcgatcgtttccgcgacgacgacgcacgcaccgtctccgcggttctctacctcaacgatgcctggttgcccgagcatggcggcgcgctgcgcctgcacctgccgcagcggcaggtggacatccagccgacgggcggtagcctggtggtgttcatgtccgccggcaccgagcacgaagtcctgcccgccagccgcgaccggctgtcgctgaccggctggttccgccggcgcaacgaatccctcctgcaactctcctgaaccctcggcggcgtcgccgcctcagtgaccccagaccttgatcgtgccgcgcaggtcggtgatgtcgcgcagttcgatgcggccgatcgagttgtcgccgatgtacaggtcgctggccacccgcaggcggatgcgctgcgccggcaggccgctggcgatcaactggtcgttgatggtggcgaggtccggcaggctgatcgccagttgctgcccgccgccgctgccggtggtcacgtccagtgccagggtcggttgctcgacgccgaagatcggcaagctcaggccgagctgggcggcgcccagggggatgttgccgccgcgcccgtccggacagtcgccggccttcacgcagccgttgtcgatcaccaggttgcgcagcgagaggctgccgccgtcgtccacccaggcgaccctggccgcgccggcgcgcaggtccaggcgcaggctgatgccggcctggccggtgacctggctgagactgtcgttgtccagggcctccatggccgcctggctggcagcgctggcgagcaacgcgggggccaggaaaaacggtagaagcgagcgggtcgggagcatgacgggcgggtccttcgcggttgcgcgggaagccagtctgctcggggcggcggaggttcgccatgggccgcccgcagttctatcctaaggatcggcaagaaatagccctggtccccgccatacgggcgctggagcgctaccgcgaggcctaactccggttgggtcgagggcgggtttccccggtgcttcccggctactgttaccgggcgtgaccatcggcgagcggcgggctactctgtgtgcctgtcaaaggggtggagcatccatgcagaaggttctggtcagccgttgcctgctgggccatctggtgcgctacgacggtggcagccatggcccgttcgacctgctctcgcgctggcatgcgcaggggcggatcgtcgccctttgcccggaggtcgccggaggcctgccgacgccccgcccgccagcggagatccccggcggccagggcggcgaagtgctggaccggctgaaccgggtcttcaccgtcgacggcgaggatgtcagcgaagcattcctgctgggtgcggaggcggcagtggagctggtccgccgccatgacatccggatggccgtgctcaaggcgcgcagtccttcctgcggcaacctggagaactacgacgggcgcttcaacggcaaccgggtcgccggcgagggcgttaccgccgccgccctcaagcgcatgggcgtgctggtattcaacgaggatgaactggaccgcgccgcggtctgcctggccggcctcgacgccggcggctgaactcagcgccgcagcggcgcggtcaggcgattctccagggctttctgcacacgctcgaagagtgccgaaagcagccagtagatgccggcggcggcgagatagagcggcagcggctggaaggtctcggcgatgacctccttggtcgccagcatcagttcggtcacggtgatcacggagatcagcgaggtgtccttgatcaggctgatcaggctgttcgacaggctcggcaccgccaggcgcagggcctgcggggtgatgatgttccacagggtctggccccaggtcaggccgaccgagagcccggcttcccattgtcccttgtcgatgccgaggatcgccccgcgcatggactccgagagataggccgcgacattcagggtcagcgccaggatgcccgcggtgaccggggtgaactcgatgcctacgctcggcagcccatagtacaggacgaagatctgcaccagcagtggcgtcccgcggaaggcgctgacgtagaccgcggcgatctgcgagaccaccggcaccttggtcacccggaccaccgcgacgctgaagccgaggatcaggcccaggaccatcgataccgcggcgaacagcacggtatacatcgcgctctggagcaggaagggccaggccatcccgagcagctcgaccaggttggcgagccattcgagcaatttctgcagcgaattcattcaacactccatcgacaaacacgacggccgcgtctctcgggcgcggccgcttcccccgttcgggcgggaactcacttcggcggctggctgacgtccaggccgaaccacttttccgagagcttggcgaagcggccgtcggccttgatcttctccagcgccgcgttcagcgcctcgccgaacttcggattgttcttccggtagggaatcgccatgttcgccaccggtcccaccgccgcgccgggcttgaccggcagcttggcctcgcggatggcgaaggggatcagcaggcggtcgttgagcgccgcgtcgatgcgtttgctggccaggtcctgcaggtattccggggcgcccggataggtgcgcacgttgacgccggccaccgacttcgccaggtcggcgtagttggtgccctggccgacgccgagcttgaggcccttgaggtcttccagcgacttgaactggcgggtttcgtcggcgcgcacgatcaactgggcgctggagatggtgtatggctcgctgaagtcgaagaccttgcgccgctgctcgttcaccgagacctggttcagcgcgatgtcgtacttgccgctctgcaggccggcgaggatgccgctccattcggtggtgacgaattcaggcttgaccgccagttcggcggccagcagttcgcccagttcggtctcgaagccggtgagcttgccaccctgcttgaagttgaacggcggataggtgccctccagggcgatgcgcagggcgccgcgctggtggacgtcgtcgagcagctcggcatgggccagcggagcggccagggataccagcatcagcaggcggggcagaaatcgcatgtagtactcctcgggtgggaatgaacgtcggtcgggcctatgctgttcgttcagcttagccgggcccgcgtcctggacaatcgcgaacctactgggttgcatgcggtctttccaggggttgcgggcattgacccggattatgtgcgcgagcgccgctctaacacgggcttcgcagtggaaatcgctgtgccagcgatgcctttccctgattcggaaggcacgaagagtgccggggaaattccgtccagtggtgtttcccgggtactaacggaagtgaaaacaggagactcccatgagagtgacattgccttgcctcggtctagccgccctgatgttcggcgcatccgccagcctgatggctgccgacctgccccggacgaaggcgcccgaaggggcgaaagtgtatttcatcacgccggccgatggtgcaaccgtcgacaagaccttcaccgtgaaattcggcctgaaaggcatgggcgtggcgccggccggcgtcgacatgccggataccggccaccatcacctgttggtggacctgaaggagcagccggcgatgaacctgccgctgccgatgaccgacaacatccgccacttcggcaagggccagaccgaaaccgagatcaccctgccgccgggcaagcacaccctgcaactgctggtgggcgacaagaaccacgtgccgctggagccgaccgtggagtcggagaagatcaccgttaccgtcaagtgacggaaacgaaaaaaggaggccgctgggcctcctttttcctttccgccggacgctgccttagaacagcacgcggctacggatggtaccgttgacctgctggagtttctccagggccaggtccgagtactcggcatcgacgtcgatcactacgtagccgaccttctcgttggtttgcaggtactggccggaaacgttgatgccgttgtcggcgaagaccttgttgatctcgctcatcacgccggggatgttggcgtggatgtgcagcaggcggtgcttgcccgggtgcgacggcagggccacttcggggaagttgaccgaggacaccgaggtgccgttgtcgctgtacttgaccagcttctccgccacttccaggccgatgttggcctgtgcctcggcggtggagccgccgatgtgcggggtcaggatcacccggtccaggccacgcagcgggctggcgaattcctcgtcgttggatttcggctcgaccgggaacacgtcgatggcggcgccgatcaggtgctcgtccttgatcgcggcggccaggtggtccagctcgaccactgtgccgcgcgcggcgttgatcaggatgccgcccttcttcatcgcgcggatttccttctcgccgatcatccactgggtggagggcagttcgggaacgtgcagcgagacgatgtcggacatgcccagcagctcgtgcaggctgccgatctgcaccgcgttgcccagcggcagcttggtcacggtgtcgtagaagaacacctgcatgcccagggcctcggcgagtaccgagagctgggtgccgatcgagccgtagccgacgatgccgagcttcttgccacggatctcgaaggaattcgccgcgctcttgatccagccgccgcgatggcaggaggcgttcttttccgggatgccgcgcagcagcaggatcgcctcggccagtaccagctcagccacagagcgggtgttcgagtagggcgcgttgaacacggcgataccgcgttcgcgggcggcgttgaggtcgacctggttggtgccgatgcagaagcagccgaccgcgatcagtttcttcgcgcagtcgaagacctcttcggtcagctgggtgcgggagcgaatgccgatgaagtgcgcatcggcgatcctttccttcagctcgtcgccggaaagcgcggtcttgaggtactcgatgttggtgtagccggcggccttcagcgtgtccacggcgttctggtggacaccttcgagaagaaggaacttgatcttgctcttgtcgagagaggtcttgctcatctgcgtaaacctgttgtcccggaggaagtggctggaaagcgaactgcgcgaagcgggtccggccggcgctggccggcacccgcaactcggcgcccagaggcactaagcgcggggggcgtatgctagcatgttctcccttttccttgcccggttgcgacctgagttgttctcaggacgaccatgaatcatttgagagttcccgaatgacccgcgaagccctgatcgaatcgctcaagcccctggtcgagcctggcaagctgctcgacgacgccgcctccctggacgcctacggcaaggactggaccaagcatttcgcccctgcgccgctggccatcgtgttccccaagagcgtcgagcaggtccaggcgatcgtccgctgggccaaccagcacaaggtcggtctggtcccgtcgggcggtcgtaccgggctctccgccgcggccgtggcggccaacggcgaagtcgtggtggccttcgactacatgaaccggatactcgacttcaatgccttcgaccgcaccgtagtctgccagccgggcgtggttaccaagcaactgcagaccttcgccgaggaaaacggcctgtactacccggttgacttcgcttcttccggttccagccagatcggcggcaatatcggcaccaatgccggcgggatcaaggtcattcgctacggcatgacccgtaactgggtggccgggatgaaggtcgtcactggcaagggcgacctgctcgaactgaacaaggacctgatcaagaacgccaccggctacgatatgcgccagctgttcatcggcgccgaaggcaccctgggcttcgtggtcgaggcgaccatgcgcctggagcgcacgccgaagaacctcaccgctatggtcctcggcacgcccgacttcgactcgatcatgccggtgctgcatgccttccagagcaagctcgacctgaccgccttcgagttcttctccgacaaggccctggccaaggtcctggcccgtggcgacgtaccgcgggcgttcgaaaccgactgcccgttctacgccctgctggagttcgaggcgaccaccgaggaagtcgccaacgaggcgctggccaccttcgagcactgcgtcgagcagggctgggtgctggacggggtgatgagccagagcgagcagcagttgcagaacctgtggaagctgcgcgagtacatctccgagaccatctcccactggacgccgtacaagaacgacatctcggtcacggtttcccgggtgcccgccttcctcaaggacatcgacgccatcgtcgaggccaactacccggacttcgaggtggtgtggttcggccacatcggcgacggcaacctgcacctgaacatcctcaagccggaaaacctcggcaaggacgagttcttcgccaagtgcgcgaccgtcaacaagtgggtgttcgagaccgtcgagaagtacaacggctcgatttccgccgagcatggcgtgggcatgaccaagcgcgactacttgacctacacccgctcggaaaccgaaattgcctatatgaaggcactgaaggcggtgttcgaccccaacgggatcatgaatcccggcaagatcttcgccgagtagcaggtgtcgcaacgcagagggccggtcatccggcccttctcgtctgtggcgggcgccacggatgcctttccacccgttcaggagtcggtaaatgagttaccagcatcaatatatcgacggcaccccgatccacttccccctgggcaagctggtctgcgtcgggcgcaactacgccgaacacgccaaggaactgaacaacccggttcccaccgagccgctgctgttcatcaagcccggctcctgcgtggtgccggtgagcggcgggctgagcctgccgcaggagcgcggctcggtacactacgaggcggaaatcgccgtgctgatcggcaagccgctgtcgcgcaagccgaaccgcgaggaggtcctcgacgcgatctccggctatgcgccggcgctggacctgaccttgcgcgaggtccaggcgaaactgaaggaaaagggcctgccctgggagctggcaaagagcttcgatggcgccggcgtgctgtcgccgttcgtgaacgccgaccagtttcccgacccgaccgacatcggcatccgcctgaccatcaacggcgaggtgcgccaggacggcaacagccgcgacatgctcaatccgatcgtgccgctgatccagcacatcgccgggcatttctcgctacaggccggcgatgtggtgctgaccggcacgccgtccggggtcgggccgctgaacagcggcgacgagttgctgctcgaattgccgggcgccagccgtttcgagacccgcgtgctctgaaccgctgcggccgccgggtgcggccggcctccctagcgccggcagcggaaacgactgtcggtcggctggccgacgcttcgattgacaggccgggggcaatgccctttcatggcgacgcccaagaaaacacctggccaaacagtcgagcctcgcccatgtcccttgcctccaagcttccccgtttccgctggctgctgccggcgttcgtcgtgctcgtcggcgtggtgctgaccatcgtcatgcattgggacgatcgcgccggcctttggtggaaggaaagccaggccagccagcagcagcgcgacgaaagcatctggctgccgggctatcgggtggtgatcgacgccaagccgttgcagggcctggaggaggaagaaacctcggacctggcctacaacccggcaaccaggaccctgttcaccgttaccggcaagcggccgctgctggtggagctgtcgctcaccggcgacgtgctgcgcactatcccgctgctcggcctgagcaatcccgaaggcgtggcggtgctggagaacggcaacgtcgcggtgaccgacgagcgccgcaataccctgaccatcttccatgtcgacccgcagaccgccgagctgagcaccaagagcctggccgaattcccgctgggcaatatcggcaagaagaacaagggcttcgagggcatcgcctgggatccgcgccagcagcgtctgttgctgagcaaggagcgcgatccgatgaccctgttcagctggaagagcgacggcgggccgagcctgagcggggcgatgaccgcgctaccgagcgacgacctgtacatgcgcaacgtctcggccctcagcgtcgacccgcgtaccggccataccctggtgctgtcggccgaatcgcatctgctgctggagctggacgagaagggcgagccggtcagcttcatcagcctgctcggcggcttcaacggcctggacagcaagatcccgcgcgccgaaggggtggccatcgacgacgagggcaccatctacatggtcagcgagccgaacctgttctacgtgttccgcaagaagagcggcgagcgcctggccaccagcgacgccgattaagcttcgcttaagcgccgattaagcctggtttcagcaaggcttcgtagcctggacccatcgaaaccaactacgaggcgttacccatgaaacttcgtcacctgcccctcatcgctgccatcggcctgttctccaccgtcaccctggccgccggctataccggcccgggcgctaccccgaccaccaccacggtgaaggccgcgctggaagccgccgacgacaccccggtggtcctccagggcaccatcgtcaagcgcatcaagggcgacatctacgagttccgcgatgccaccggcagcatgaaggtggagatcgacgacgaagacttcccgccgatggaaatcaacgacaagacccgggtcaagctgaccggcgaagtcgaccgcgacctggtcggccgcgagatcgacgtcgagttcgtcgaagtgatcaagtaaggccctgaatcgaaacggcccgcctcccggaagagaggcgggccgtttcgcgttccgaccgggcgaagttgcgggcgggcttaccggtgaaccccttcgaaaccctgtagcacgttcaccgcgttgatcccgatttcctccaccgcgtagcctccctccatcacgaacagcgtggccaggccgagcttgccgatggcttcgcccatgcgcaggtagtcggggctgtccaggcggaactgggaaatcgggtcctccttgaaggtatccacccccagggaaacgatcaggacgtccgccgcataggcctggatctgccggatcgccgcctgcagcgcctggctccaggtcgcccagtcgctgccggccgccagtgggtagttgaagttgtagccggtgccgacgccgttgcccttctcgtcggcgtagccgaggaaataggggtattcgaagcgcggatcgccgtggatcgaggtgaacagcacatcggcgcggtcgtagaagatgtcctgggtgccgttgccatggtggtagtcgacgtcgaggatcgccacccgcccggcgccccggtcgaggaaggcctgggcggcgatggcggcattgttgaagaagcaatagccgcccatgtagtcggccgcggcgtggtggcccggcgggcgacagagcgaaaataccgagcgcgcgccgttggcgagttcggactggccgctgagggcgacgttggccgaactggtgatcgcctgccaggtcccggcggtgatcggcgcgccggcgtcgaaggagtagtagccgaggcgaccgtcgatgttgtccggctccgtctgccgcaggcgccgggtcggccaggcgatcggcagcatatcgtggctgcggccggtggccagccagtcctgccaggcgttctgcaggaaacgcacgaaaccctcgctgtgcacccggcggatcggttccaggccgaagtcgcgcggtgcgcggacttcgccgaggccgacggccttcacgcggtcgaggaccatgtcggcgcggctgggtttttcgaagcagggggtgaactggccgccgatcagttcgtgccggccgtggtgcaggcgatggtcgtcgctgtagatggtcagcatgtcgggctcccgggctcagttctgttcggagaaggtcacggtcggcgccttgcggcggaaaccgccggtatgcaacgccaggtaggcgaggccggcggcgaaccaggtcaggccgatcaccagggtcagcgccgagaggctggtccacagccacagggtcaggcccaggccgatggccggcaccagcccgtagcgcagcaggtcgcgcggggcgcggcggccgtcgagcagcaggtagctgcggatcaccgccaggttcaccgcggagaacgccaccagcgcgccgaagctgatcatcgaggccagggtggtgaggtcgatgaccaccgccagcagggaaatcaccgagaccaccaggatcgcgatcactggcgtcttgaagcgctccgagaggctgccgaacacgcgccgcggcaggatgccgtcgcggcccatgctgtagaggatgcgcgacaccgaggcctgcgaggccagcgccgagccggcggcgccggcgacgtaggcggcggtgaagaagctggcgaggaacttgccgccggccgccagcatcacttcgttggccgccgactcggcgtcctggaatacgctgccggggaacaccagttggctgaagaccgccagcacggtgaacagcaggccggcgccgaccgtggtgatgacgatggcgcgcgggatgtcgcgttgcgggtcgcgggtttcctcggccagggtcgagaccgcgtcgaagccgaggaacgacaggcacagcaccgccgcgccggccatcaacggggcgaagcccggctggctgccgtcgccgacgaagggcaggctcaggtccagcgaggggatgccggccaggtgcttgaccgccatggcgacgaacaccacggcgaagacgaactgggcgccgacgatcacgttgctcatgccggccaccgagctgatgccgatcacgttgagcacggtgaccaggccgatcgccgcgagcacgaagacccaggccggcaccatcgggaaggcgatgttgaggaacaggccgatgagcaggtagttgatcatcggcaggaacaggtagtcgagcagcagcgaccagccggcgaggaagccgacgcaggggccgaagctgaggctggtataggaataggccgagccggcgatgggatatttcttcaccatgaagctgtaggaaaaggcggtgaagagcatcgccgccagggtgatcaggtaggcgctggcggtgcgaccgccggtgatctcggtgactaccccgtaggtggtgaacatggtcagcggaaccatgtagaccagcccgaagaagaccagggcgggaagcccgaggatgcgccgcaggccggtgccctgggcgctgtggacgtactcggggcgcttgccgccgatgaggatgccgttgttgcgttcgctggccatgttccgctcctcgcgaaatgccgtatcgatcccgcaggcggccgcttgggcggacctttcctgcgccgggtgaatggacgggctagtggaaaaccgctggggtttccgccgggtcggtggaaatggcagtgacgagagggcgcgcggcgtgtgcgggcacgggcgttggggcgtcgatagtgttcatggcgttctcaggaagcgttcttgttggatttctagctcgcggtcgcgaggttcccttgggctctgccggcgccgtttccgcggctccgggcgacccctcgaggagggcgcggttcgactctagcaatccggtttcgccggggagaaccctgtagacggtcaaaaagggatcgaaatggccaagctggctggccggccagcgctggcgcgagctggccgccagcgccgcgtcgattatttcttaagcttggtccagaccttgctgcgcaacgccagggctttcggcgagcagagcttgaacggcttcaggcggtcgagcttgtcctgcggggtgttgatcgccgggtcgtcgaacagtgctttctccatgaatttctccgagccgacgatggcgttgttgtacttggcgaagttggaggcggcggcgatgttctccgggcgcatcatccagtcgatgaagacgtgggcttccttgacgttgctggcgtcgcgcggaatcgcgaagttgtcgatgaacagccggatgccttccttcggatagacgtattcgaggctggcgcgttgggcgtgggcgcggtggaaggcgccgttccactgctggtgcatggcgacctcgccggcggccatgcgctcgatggtgccgtcgctgttgtacatggccagcgccggcttttgcctgagcagcaggtcgaggaccttctgcgcttccctggcgtcctcggtgcattcgtcgatgccgaggtagtaggtggcgggaatgaacagttcctcgatggagttcagagccaccaccttgcctttcagctcggctggtggttcgaagaacggcttccagctttcttccagcctgccgcccggcaccttcgccgtatcgtagctgtagccggtggtgccccagagatagggaatgctgtagtcgtggccgggatcgaagccaagggtccggaagttttccttcagattgcccaggctcggcaactggctcttgtcgagcttttgcagcagcccctccttgacgaatatttctatgaaactgtccgacggcaccaccacgtcgtaggcgccgccaccggccttgagcttggccagcagcgtctcgttgctgtcgtaggcgtcgagggtggccttgatcccggtgtccttctcgaacttcttcagcaactccggcgggtagtagtccgaccagttggcgaagtgcagggtgccttcggcgcgagcctggccgcccagggctagaccggcggcgaagagcagggtgagcggtgtgcggtaggtcatgatggactcctggcgatcttctgttttttcttcgtggaggcaggttctcagcggcggcgttggccgaggtagtacgacagggcgacgaaggcgatggaaatcatgaggatgatcgaggaaatcgcattgatcttcggggatatgcccatgcggatggaactgaagatgtacaccggcagggtggttgcgccggcgccggcgacgaaataggtgatgacgaaatcgtccatcgagatgatgaacgcgagcatcgccccggacagcacgccgggcatcagcagcggcagggtgattttccagaaggccttccacggcgaggcgtagaggtcggcggcggcctccgccaggcgcgggtccaggccctccaggcgggcgcggatcggcaggtaggcgaaggggatgcagaacacgatgtgggcgatgaggatggtgaacaacgacagcttcaggccgatgaaggagaagaacatcagggtcgccaccgcggtgacgatctccggcaccagcagcggcaggccgagaacgccgttcatcagggtctgcccgcggaaggcgcgaccgcgcatgcccagcgcggcgagggtggccaggacggtcgaggccagggtggcgagggtggcgacgagcagcgagttcttcgccgcgcggaggatttccggatcgttggccaccaccgcataccatttcaggctgaagctctcccagagcgtcgccgactggccgctgttgaagctgagcactaccagcaccaggatcgggatgtagaggaaggcgaagaacagccaggcggcctggcgcacgccgctgaaggtccagagtggattgcggccgttcatggctggcctccgccggcgttggcccggaagcgcaggttgtagatcagcatcgccagcaggacgaaggccagcagggcgaacgaaagggcggcgccgaacggccagttgtgcgcggtaccgaattgcagctggatcaggttgccgatcatcagcgccttaccgccgccgagcaattccggaatgatgtagctgcccagggccgggatgaataccaggatgcagccggcgactatccccggcatcgccagcggcacgatcacccggcgcagcgctttccagcggttggcgccgaggtcgaatgccgcctccaccaggcgccagtccatcttttccaggctgctgtagatcggcagcaccatgaacggcaggtaggtataaaggaggccgatgatcaccgcgttgtcggtatagagcagccccagcccggtgtcggtcaggccgatgccttgcaggccggcgtccaccagcccgccgttgcgcagcagcaggatccaggcgtagacccgcaccagcaggttggtccagaacggcacggtgaccaggaacagcagcaggttgcgccggcgttccggctgcaacgccaggtacagcgcggtggggaagccgagcgccaggcagccgagggtggtcagcagcgagagccagaacgagcgctggaagatgcccaggtagtcggcgttgaacaccaggctgtcgtccaggtcgcgttcccagaggaaattgaggtaggcctccaggctgtgctggccccatttcactccgccgtagtcgccggattgctggatcgacacggcgaacatgatgcccagcgggatcaccaggaacagcaccagcatcagcatcgccgggctgctcagcagcaggcgccgacgcagctgccggcgttcggccgactgttgcgcggtaggtcggccggcggtgctcattcggcgagcacccggatggcggcggcgggaatccgcacccgcaccttcgcccccggactgtgcgggcagcgtgcgccgtcgcggttctgctggcgcacgcggaagcccggctgtccggccacgttcaggtggtagacggtatcggtgccgacatagacgatgttttccagcacgccttccaactggccgtcggcggccagttcggtgcgctccgggcggatcgccaaggtcacagcgccgctgcccggggtcgtcgcggccagccgctggccgtccgccaggcgcacgccgtcggcgtcggcctggccctcgaggaagttggtttcgccgatgaagtcggcgaccgcccggttcagcggcgcctcgtagatgtcgctgggcgtgccgacctgcaacaccttgcccttgctcatcaccgcgatgcggtcggacatggtcagcgcttcctcctggtcgtgggtgacgaagatgaaggtgatcccggtctcgtgctgcaggcgcttcagctcgatctgcatttccttgcgcagcttcaggtccagcgccgacagcgactcgtcgagcagcagcaccttgggccggctggccagcgcgcgggccagggcgatgcgttgctgctggccaccggacaactggtcggcgcggcgcttgccgacctccggcagcttcaccaggtcgagcatgcggctcacggtggcgtcgatctcgctgcgcgggcggccctgcatctccaggccgaagccgatgttgtcggcgacgctcatgtgcgggaacagcgcataactctggaacaccgtgttgaccgggcggcggaacggcggcaggccttccatgtgttcgccatagaggcggatgctgccggaactgggctgttcgaagccggcgatgaggcggaggagggtggtcttgccgcagccggaagggccgaggagggtgaagaattcgttggcgtggatatccagggacacatcgtcaagggccttcaggccttggccgggggtaccgaattccatgcagatccgctcgatggctatcgcgctggtcatgctgaattccatgcagtcaagcagttgttattgttgaggttttgcggtttctggggcccgcttcacctgctgcggttcgataatgaccggggcgccgcgggcgcagaacgatagatgcggccaataagggatcgaacaggccaatctggtggcgctggaagaagactgcggatgctctcttgtcgtctctttcggacaggaaactcggacctgtccgagtcgcccgggcggctggctgactttaagcttggcttcagcctggagccgtagcttgcgtaggaaaggtcgggcgcagcccgtttccatacagcgtacaggctctatgctatgactatccacgcccaaactcccgagccgttttccatgtcccgagctttcacgcctcgccgtctgctgctggccgtcctgctggtcgcgctgtccgcgctggtccttctcggccagagcttccgggtcttcgaccgggcctggttcgccgtccaggagtggcgtcacgccgatgcctggaaagagcgctcgatatggctgccggactaccgcgtgcggatcgaggcgcagcccatcgaggggttgaacgacgacgtttccgcgctgaccttcgatcccgaccggcgcaccctgttcaccgtgaccaaccagccggcgcagatcatcgagctgtccttgcagggcaaggtactgcggaccatcccgctgaccggcttcggcgacgccgaggccatcgagtacatcagccgcggcgtctacgtgatcaccgacgagcgccagcaacgcctggtcaaggtgcgcctggaggacgacacgcgcttcatcgacgctgccgatgcccagcagctttcgctgggtatcggcctcaacggcaacaagggtttcgaagggctagcttacgacgccgagggcaagcgcctgtttgtcgccaaggagcgtgacccggtgcgcatctacgagatccacggtttcccccacacccaggcggacaaaccgttcgccgtgcacgtggtggacgaccccgggcgcgacaagcgcctgttcgtccgcgacctgtccagcctgcagttcgacgagggcaccgggcacctgctggcgttgtccgacgagtcgcgtctggtagtcgagctggacaccgacggcgagccggtcagcaccctgtcgctgctgcgcggcatgcacggcctgaagcgcagcgtgccgcaggccgagggcgtggcgatggacgaccgtggcgtgctctacctggtcagcgagccgaacctgttctacgtcttcagcaaggacgagccggcgcagccctgacgcggcctacggggacggcaggagcgtcccctggcccgctcagaactgccagttcaccccgagcgaatagcccgcctggttgccttcgctgtgggcgaagcggctgttggcttcggcgaagaccccgagctgctcggtgatcgccagttgcgcgccaagctgggcgcggccgaaatccttgtccacgccgcccatgtcggcgacccggacacgcccgtcgccgcggctggtcaggtccatgtcgtccaggcgtccgtctgccagctcgcggacccagcgcaggctggcgtagggttgcaggcgcattctcgcgcccagcgccagctcgccgcgcaggcgccagccgagactcgcctccagcgagtcgtagtcctgcttctcgtagccgagtgcggtacgcagggcctcgtcctcgcggaagtcgtcgatgcggtagtgcatgtagtcgaggccggccagcggcccgctccgcagttcgccgaagctgaagtcatagccgccttccagccgggcgccccaggaccaggccgaggtgtcgcccgacagacgctggtcgagcagcaccggcccgccggcggcctggaggtagaccgaacgcttgctgtcgtagcgggtatgcccgaggttcagctcgccggccagccattccggaccgccgtcgttgtacaggccgaacaggccgagctgccaggtgtcgccctcgatgcgcccaccatggtccagcttgtcgcggctgcgctggaaggccaggctgccgccgagggtcagggcctcgctgtagcggtagtcgccgagcagatgcacgccggcgcgcctggactccggattgccaggcatgtcgaaaccgctgtccggcgagacctcgccctccgcgcccacctcgccgtcgaagctgcctaccggccggttgctgccgagcagggtcagccagcggcggtcgtgcaggcgggtcagtgcctgatgctggcgctgcaactggtcttccatctgccgcgccagggcgccgccggaggcggtggaggccagcaggtcggcgttggtcagctccagcaccaggcgcgtcagcaggcgggaaaagtcgcgcatgcgttgctcgatgcgctcctggccgagggcgttggtcagtacttccttgttgtcctcggccgggtcgtgccaggttgagccgccgggaatcgccgggttgtcggtctgctcgtagccgtccaggtcgcccagttcccagttggtcgcctcgatgaacaacaccgggatgtccatcccgttgaagctttcgccgtcgctgcagcagccggtacccgccgggtattcggcgttcaggccggggttggtgaacaacgggatgtccagctcgcgggcgatgcgcaggatctgttcgcggtaggcgccgagggccgggctggacacgctgttggagccggcatgggcgtacatcttgtcgccggtgaccaggctgtcgaggttgatcattcccagcaggttggcgcgctggctggcgtcgagggactcgacgtaggcacgcgaaccgcgcaggccttcctcctcggcgccgaaaccgaccacctcgaggccgttctccagggcgatgccgccgaggttgcgggcgatctcggtgagcaccgccgcgcccgaggcgttgtcgtccaggccctgcagggtcgggcgaccgtagtaggtgtcgtagtgcgcgccgagtaccaggaacttcccgctgctaccgggcgccgaggcgatgacgttctgtgaactgcggttgccggcccaggtgaagtcctggcgactggtctggtagccgaagcccaggcgcgactgcatcagttcgctggcgccggcgaagctggcggtgccgcgatagcggcccgggtagtcggtgatcaggcgctccagggtctccccggcgtattccccgtattggtaggcgttggcgcccaacgacagcgcggcacatcccaggcctacagcgacagctaatggtttgaacacggcactttcctctgtgtcggtacgatggtgcatcgaatgatgctcgcgccgcggaaagcaggatgcggaccgtttcatgtcccggtggcacgaagtgacgcctggtcgacctgcggtgtcgccaggttgtaagaagcgtcgctcctggagatgggcgggaagcttcgtgctggacgtagtgttaccggcgatggcctgtactggggcgtgacttcccgtttcggggcttggtaaccgcgagcggtcgatttacagtgctcgccctgccgatctcctggatacccgtcgcatgaacattttccgcgaagccctgctcaaccgtcgcctgaagaaggccctggcacgtcacggttgccgcatggccagcggggtcgagacgctgcgcgacggcacgcaggtgacgctggagccgaacgtgaagctgggcaaggcgaagatccactcgccagcactggaggtcggcgcctataccgacgtggtcagcggctgcgagttcttggaggtggccagcatcggccgcttctgctcgatcgccaccggggtggtgatcggccagccgcgccgctcgcatccaatgcactggctgagcacccacgccttcaccgccaatccgaagctgttgcgcaagccgttgcagcccgagcgcgaagcgaccccggcgcggatcggccacgatgtatggatcgggcgcgacgcgctgatcctcgatggggtggagatcggcaccggcgcggtgatcggcgcgcaatcgctggtcaatcgcgacgtgccgccctacgcggtggtggcgggctcgccggcgcgggtgctccgctatcgcttcgcgccggatctgatcgagcgactgctggcgagtcgctggtgggagttgccgctggacgtgctcggcgaattgccgctggacgatccgcaggcctgcgtcgaggcgctggagcgtcggccgccgcaggcgcgccaggaggcgcggcgcttgcgcatccggcacaagccgttcgccatcgaatggctgtcctgaggcccgcagccgccgccggcgtcgacggcggccagggctgggtcagctttcgtcgctgagaccggcttccggcgctgcgcgcttcaccgactgcacgccggcttcggcgttggcctggctggcatagagctggctctggccgacgacctggccattggtggccttgagtacgaagtggaacttgccgttgctggccggcttgacctcgaaggcaccgtcgcgctgggagttcttgcgcaccgactcgatgccgccgagcgccgagtccttggccttgtacagttcgctggtgagaatgatctcgccgttggcggcatgcaggttgaagtggaactggccgtctttcgctttcttcagatggaatttggctgccatgtctagctccttgttcacagggtgaggcggatcgcaacggaccagccgtctgctgagacacagcgtagccgcttttgttgcagtgtcgccccgctccggtcatcggcctggggcgagcgggctcaggccttgagggtcttgacgccgtcggcggtgccgagcagcagcaagtcggccgggcgggcggcgaacaagccgttggtgaccacgccgacgatggcgttgatcttctcttccagttccaccgggctgtcgatgcgcaggttgtgcacgtcgaggatgatattgccgttgtcggtcagcacgccttcgcggtagaccggatcgccgccgagcttcaccagttggcgggcgacgtggctgcgagccatcgggatgacctccaccggcagcgggaactggccgaggatgggcaccagcttgctggcatcggcgatgcagatgaaggtcttggccaccgcggcgacgatcttctcgcgggtcagcgcggcaccgccgcccttgatcagctccaggcgctcgttgctttcgtcggcgccgtcgacgtagaactccagctcgctgaccgtgttcagctcgtagaccgggatgccatgctccttcaggcgcttggcggtggcctccgaactggctactgcgccgtcgaactcggccttgtggcgggccagggcatcgatgaagaagttggcggtggagcctgtgccgacgccgacgatgctcttgctgtcgaggtgcggaagaatgtggtcgacggcggcctgtgccactgcctgcttgagctgatcctggttcatcccgggtgcctgtctggttgcctggccggccgtcccggcggcgcaggcggagggtgcgcgcggccggggcggcccggcgggtttccggcacgtcctgtgccgctgcgatacgaagggacgaattatagcggcctggcgtcctccggtcttgccccggatgaccggcagtcgcggtgttttcctgcggcgcgccggtagtccgcccggcgggcctggagtagactccgggcttccgtgaagtccgccgaaccgcctccgatgctcgaacaatacgtcaagaagatcctcacctcgcgcgtctacgacgtcgcggtggaaacgcccctgcaacccgcccgccagttgtccgaacgcctcggcaaccaggtcctgctcaagcgcgaggacctgcagccggtgttttccttcaagatccgcggcgcctacaacaaggtcgcgcagctcaccgaggaggagaaggcccgcggggtgatcgccgcctcggccggcaaccacgcccagggcctggccctggcggccaagcggcaggggatcagggcggtcatcgtgatgcccaagaccacccccgagatcaaggtccaggcggtgcgcgcccatggcgccaaggcggtgctgcacggcgacgccttccccgaggctctggcccacgcgctgaagctggtcgacgagaagggctacaccttcgtccatccctacgacgatccggacaccatcgccggccagggcaccgtggccatggagattctccgccagcagcccggccgcctcgatgcgatcttcgtcccggtgggcggtggcggactggtcgccggcatcgccgcctacgtcaagtacctgcgtccggagatcaaggtgatcggcgtcgagccggacgagtcgaactgcctgcaggcggccatggccgccggcgagcgggtggtgctgggccaggtcgggctgttcgccgacggcgtggcggtggcgcagatcggccagcacaccttcgacatctgcaaggaccacgtcgacgaagtgatcaccgtcagcactgacgagatctgtgcggcgatcaaggacatctacgacgacacccgctcgatcaccgagccggccggcgcgctggcggtggccgggatcaagaagtacgtcgagcgcgagcgcgccgaggggcagaccctggtggcgatcgactccggcgccaacgtcaacttcgatcgcctgcggcatgtcgccgaacgcgccgaactgggcgagcgccgcgaagcgatcatcgcggtgaccattcccgagcggccgggcagcttcaaggccttctgcgaggcggtcggcaagcgccagatcaccgagttcaactatcgctaccacagcggcagcgaggcgcacatcttcgtcggcgtgcagacccacccggagaacgacccgcgcgaggcgctggtggcctatctgcgcgagaagggcttcccggtcctcgacctgaccgacaacgaactggccaagctgcacatccgccacatggttggcggccatgcggtgaaagtcagcgacgagatggtgttccgcttcgaattccccgagcggcccggcgcgctgttcaacttcctcaccaagctcggcgggcgctggaacatctcgatgttccactaccgcaaccatggcgcggccgacggccgggtggtggccgggttgcaggtgccggaagacgagcgccacctgatcccgcagaccctggaggcgatcggctatccgtactgggacgagaccgccaacccggcctaccagctgttcctcggctgacccgcggcggctcgccgacacgggctgctaagcttcacgggcaggtgatctccttcctcgggaactgagcccgcccccggcccctcaaacgggccgggaacacggacaaggatgcgctgatggaacattttctccagatcaagattctccacggagtcgccaccgtgctgctgttcggcggcctgctcggcctggcgttctacgcctggcgcagctggcggacgggcgacgcggctcgggtcgcgcgcggtttcaagcgggtccgcctgatcggctggccgctgctggggctcagcctgctggccctgccggtcagcggctggtggctggtgcacctggccggctggccgttgggccagagctggctgctgttcggcgcctgcctctatctgctcggctgcatcttctggctggtcctcgccggccgcctggcgcgggtccagcaccaggccggcgccgccgagacggcgggggccgcgctgggcgagcagaccctgcgcgagatcaaggtgggcctggtcatggccctgctcggtgcggccagcttcatcgcggtggcggtactgatggtcagcaagccgctctgaaacgccaacgaaatggacttcaccggccttcgccggttctgtaggaacgcatgcgtattctgctggtaggcgcgggaggtttcgtcgggcggcacctgctcccggcgctgctcgccgccggacacgaactgctcctcaccgcgcgccgcccgccggtcgatgcgcctgccggcgtacgctggctggcgctcgacctggagcggcttgcggaaaggccggacagcttcgcctggcccgccggggtcgacttgctgatcaatgccgccggcaccatgagcctcgacgaggcgagcatggctcgcgtccaggacagcggcgcgcgaacactcttcgacctcgctgcagcccatggggcgaaggtcctgcagatttccgcgctgggcgccggtgcgcacccggacgtggccttcctcgccagcaaggcggcggccgaccgccacctgctggaactgggcatcccggcgctggtgctgcgcccgtccctgctgctggggccgggcggcgccagcagcgcctggctggaacgcctgtcgccgctaccgctgattcccttgctggacaatcgcgcgcgcctgcaaccgctgcatgtcgaggacctggtcggcgcggtgctggccttgctgcgccgctggccggagcgggcgcaggtgattccgctggtgggtccgcaggcgctgacccagggcgagctgctggacgagctgcgccgcgcccagggttggccgcgcggccgctatgtggtgccgcccgcggcgcttctcgatgcgttgggcgggcttggccggcgtgctggctggcggacactgagtccatcgatgctgaagctggtgcgccacgacaacctggccgacccggcactcctcgatgcggcctgcggctatcgttgcgcgccgttggccagtcgcctgctcggctggccgcaggcggcacgcagcctggcggcgctgatgcggccgctgatgctggcggccctggtgctgatctggctgggtaccctggtcgcctgcctggggccgggttacggttggggcctgcggatcctcggcgaggccggcatccacggctggccggcgagcctggcggtgatcgccggggccctgctcgacggtgcgctcggcgtcggcctgctgctccgccgctggcgccggcgcgcgctgctggcgcagttctggctgatgcttggctacagcctggcgatcagcctgatcctgccgcactactggtacgacccctacatggcggtcggcaagaacatcgtgctgatggtggccacgctctggctgctgggcgacgaacctcgagccagggaggcccgtggatgaacctttacctgctgctgaaaaccctgcatatcctttcctcgaccattctcttcggcaccggcctggggtcggcctactacgccctgcgcgcctggcgcagcgggcagttgccggtgatcgcggtgaccttccgccacctggtcgccgccgactggctgttcatcgccaccacagcggtgttccagccgctcagcggcctggccatggtgcatgtcgccggctggtcgctggcccagggctggttgctgtggagcctgggcctctacgtgttcgccgggctctgctggctaccggtggtgtggttgcagatccgcgtacgcgacatggccgaggcggccttgcgcgaggcgcggcccatcgaaccgctggcgtaccgctacatgaacgcctggttcatcctcggctggccggccttcatcgccttcatggtcatcttctacctgatggtcaacaagccggtctgagagtcccctcggcgcaaccagagcaacgccaggaccaggaacgccagggagccgccccagtacaaccaggcgaagccgccgggccgctccagcaggaggaaggccagggccgggcccagcgcggcgccgaggtcctggacgatggaatagcgggtcatgaagccgaccacgtcgccggcgcaggcgacgtcggcggcgagggcgtcggtcagggtggtgagggcggtggcgaccagcatcaccagcagggcgatggccagccaggcgagaatgggcagcctgctggaaagcaggccgaagcccattgcgccgaccagtagcgcagccacgtagaagcgccgacgcccgcgcgggccatccgaccaggctccgaagcgcccggccagccagggctcccaggaccagcgcagggcctggatgatcccggagaggccggcggcgctgagcgccaggccgagcaggctgacctcggtgccgaagctgcgggcgatcagggcgctcagggtggcggcgagtacgccctggatcaggagcgcggtggcgaagccgctgaggatcaccaggccgcgcggcggcgggcgcctggcgacgctggtggctgccgttgcggcggaggtccgcgcatgtccggcgggattctccggcaggtcgaaacccttcaccagcagcggcaggccgagcagtgccaggaacgcgaaggacagcgccagcgccggcaggccgaggaccggcaccagcagcccaccgagcagcatgccgaccaggctgcccaggcggtagaggccgttgtacaggcccatggcgcggccgcgctggtggtcggcggcgcagtagaccaccgccgagagtccgccgatgcggaagaacgaccagccgatcccccacagtccgcgcagcagcacccaggccaggaaaccgctggccaggccgtagccggcggtgctcagcacgccgatgacgaccgccaggagcaggccggtcttcagtgccaggtgcttgtacaggcggccgatcagcggattgaagggcaggcggatcaggcggttgatcgacagcagcacgccgacctgccagagcgcctccaggccgacctcgtgccagtagatcggcaaggcgatataaagcatcgagtcgccggccaggcatagcgcggtgaccagggcgacgatcacgaccggccgcagcgagccgggagcgggggctgtgtggggcatcctggggccgccgtggcgccgcccgtcggacggcgcgcttgtcagtgggtcaacgcagggaaatgatcggccagccgcgtttttccgcctcggcgcgtaggcgcggatcggggtcgacggccaccggccggctgaccttttccagcagcggcaggtcgttcagcgagtcgctatagaagctggcgccttccaggtccaggccgttctcgtcgagccagcgttgcaggcgcaccaccttgccgccctggaagcagggcacgtcgaaggtctgcccggtgtagcggccgtcgcgcatctcgcactcggtggcgatcagggtctccaccccgagccgttcggcgatcgggccggtgacgaagcggttggtggcggtgatgatcaccagccggtcgccggcggcgcggtgctcggcgagcagcgcctcgcccttggccagcacgatcggctcgatcacttcctgcatgaactggcggtgccaggtttccagctgggccatctcggtgcgaccgaggatcgcctgggtgaaggcctggtaggcaaggacgtcgagcttgccggcgacgtagtcggcatagaaggcgtcgttgcgcgcctggtattcggcggcgtcgaccaggccgcgctggcacagccattcgccccagctatggtcgctgtcgccggcgagcagggtgttgtcgagatcgaaaagggccagacgcacggggtgactccatcggttggcgggtggcggaagggccgtgagagccttttgcgaaggctcccaccgggccttgggaaagcccctagcctaccggcttttgccggccctgtatcctccccgcacgagtcgcaaagccgcgcgttgccgctatcacaagctttatggaacaatgcgggcacatgcgatttcgaggatgtcccagcgtgatcgattccgatggttttcgcccgaatgtcggcatcattctcgccaacgaggcggggcaggtgctgtgggcgcggcgtatcaatcaggaagcctggcagttcccgcagggaggcatcaatgatcgcgaaacgccggaagaggcgctgtatcgcgagttgaacgaagaagtcgggctggaggccggggacgtgcgcatcctggcctgcacccgcggctggctgcgctaccgtttgccgcagcgcctggtgcggacccacagccagccgctgtgcatcggccagaagcagaaatggttcctgctgcggctgatgtccgacgaggcgcgcgtgcgcatggatatcaccagcaagcccgagttcgacggctggcgctgggtgagttactggtaccccctgggacaggtggtgaccttcaagcgcgaggtctaccgccgcgccctgaaggaactggccccgcgccttctggcgcgggactgaacacggagacaaggccccgagcatgctcaacacgctgcgcaagatcgtccaggaagtgaactccgccaaggatctgaaggcggcgctgggcatcatcgtgcagcgggtcaaggaagccatgggtacccaggtctgctcggtgtacctgctcgacaccgagacccagcgtttcgtcctgatggccaccgaaggcctcaacaagcgttccatcggcaaggtcagcatggctcccagcgaaggcctggtcggcctggtcggcacccgcgaggagccgctcaacctggagaacgccgccgcccacccgcgctaccgctatttcgccgagaccggcgaggagcgctacgcgtcgttccttggcgcgccgatcatccaccatcggcgggtgatgggggtgctggtggtgcagcagaaggagcgccgccagttcgacgaaggcgaggaagccttcctcgtcaccatgagcgcccagctcgccggggtcatcgcgcatgccgaggcgaccggttcgatccgcggcctgggcaagctcggcaagggcatccaggaagccaagttcgtcggcgtgcccggcgcccccggggtcggggtgggcaaggcggtggtggtgttgccgccggccgacctggaagtggtgccggacaagcaggtcgacgacatcgacgccgagatcgccctgttcaagcaggccctggagggcgttcgcgccgacatgcgcgcgctgtcgagcaagctcgccagccagttgcgcaaggaagaacgcgcgctgttcgacgtctacctgatgatgctcgacgatgcctccatcggcaacgaggtcaagcgcatcatccgtaccggccagtgggcccagggcgccctgcgccaggtggtgatggagcacgtgcagcgcttcgagctgatggacgacgcctatctccgcgagcgcgcctccgacgtcaaggacatcggtcgccgcctgctcgcttacctccaggaagaacgcaagcagaacctgacctacccggaacagaccatcatcgtcagcgaggagctgtcgccggcgatgctcggcgaggtgccggaagggcgcctggtcggcctggtctcggtgctcggctcgggcaactcgcacgtggcgatcctcgcccgtgccatgggcatccccacggtgatgggggcggtcgacctgccgtactccaaggtcgacggcatcgacctgatcgtcgatggctaccacggcgaggtctacaccaacccctccgccgagctggtgcgccagtacagcgacgtggtcgccgaggagcgcgagctgagcaagggcctggcggccctgcgcgagctgccctgcgagaccctcgacggccaccgcatgccgctctgggtcaacaccggcctgctcgccgatgtcgcccgcgcccaggagcgtggcgccgagggagtgggcctgtaccgcaccgaagtgccgttcatgatcaacgaccgcttccccagcgagaaggaacagttggcgatctaccgcgagcagctcagtgccttccacccgctgccggtgaccatgcgcaccctggatatcggcggcgacaaggcgctgtcctacttcccgatcaaggaagacaacccgttcctcggctggcgcggcatccgcgtcaccctcgaccacccggagatcttcctggtccagacccgcgccatgctcaaggccagcgaaggactggacaacctgcgcatcctgctgccgatgatctccggcacccacgagctggaagaggccctgcacctgatccaccgcgcctggggcgaggtgcgcgacgagggcgtggacatcgccatgccgcccatcggcatgatggtcgagattcccgccgccgtgtaccagacccgcgagctggcccgccaggtcgacttcctttcggtcggttcgaacgacctgacccagtacctgctggcggtcgaccgcaacaatccgcgggtcgccgacctctacgactacctgcatccggccgtgctgcatgcgttgaagaaggtggtcgacgatgcccacctggaaggcaagccggtgagcatctgcggcgagatggccggcgatcccgcggctgccgtgctgctgatggcgatgggcttcgacagcctgtcgatgaacgccaccaacctgcccaaggtgaagtggctgctgcgccagatcaccctggacaaggcccgggacctgctcggccagttgctcaccttcgacaacccgcaggtcatccacagctcgctgcacctggcgttgcgcaacctcggcctgggtcgcgtgatcaacccggcggctaccgtccagccctgatttcccgcgcgccggacgcttcgtcgtgcggcgcttacgctttccccgcaagcgtatagactgcctgccattcggtagaggccactggccagtcgaacgtgcgagggattgccgcaaaatggacgaacgggcgtcgaagccgccaggtcttcttccgctgtcacgcgaagaccttgagaaaaccctgcgatatgccctggagatcgtcagcgacgggatctgggactggaacatcgcgaccaaccaggtcagccgcagcgccggctggtacctgatgctcggctatccgccgcatagcctgccggagagcgtggagacctggaagagcatcatccatcccgaggactatccgcgggtgatggccagcttccaggcctacctcgacggcgaaagcccggaatactgcgaggaataccgctgccgcacctacagcggggattacctgtggatcagcgatcgcgggcgtttcgtcgagttcgacgagcgcggcgagccgcggcggatgatcggtgcgcaccacgatatccatcagcgcaagctggtcgagctggagttgcagcagcgcaacgaggaactgttcgactggaacctgcgtctcgaggaactggtggccgagcgcaccgaggcgctgcaccgggtcaaccaggcgctggcctcgaagatggccgaggcccagcgcctgagcgaaatcgatccgctcaccgagctgtacaaccgacgcaagttcgagcagtgcctgcaccatgaatggatgcgccggcagcgccatggacgcgccacggcactggtgatgatcgatgtcgatcacttcaagcggatcaacgacctgttcggccactccaccggtgatcgcgtgctggtcgccttcggccgcctggttgccagcgagctgcgcgaggtcgacgtgctggcgcgctggggtggcgaggagttcatcctactgctcccggaaaccggcctggaggccgcggcggccttggccgaacgcctacgccagcgggttcgctcgcagtccttcgagatgggcgagcggttgaccgccagctttggcgtcggcgtgctgaatgatggcgagaccctcgacctgctgctgtgccgggtggacgacgccctctatcgggccaagcagcgtcgcgattgcgtggcctgttgctgaaggtcagcctggcggcagcaccaggctgacctcgccgagccgggcgccggacggcccgaagctgcgctcgatcatctcccgcgtgccgtcggcgtgtacccgtacgacgctgctggcgcgagtgccgtagctcgggctggcgatgaacacgctggagagcaggcgttccgtggccagacccacgccggtatccggcaactggccgtcggcggccggcgctgcgtcggccagcagctccatcagggcctgcggatgcggctcggcaagccgctcggcgagggcggcgcgagccttgagcagcttcggccagggcgtatcgagggccgcgttggacagcccgtagatccccgccggcagcaggcgcggtggccctacgcgggggttgtagtgccagagctgatggcgatcgccaatgagcaggttgaagccggaatagtccgcggcgcgcccggcgacctgcgccaggtagtcggccgggttgccgccgccgcgcaggaagtccgccaccagttcgccacgggagcgcttgccgagagcctgcgacggatcgcggacgttggtcagggcggcgaaacggccggccgggccgagccccagccaggtgccgccggcctccaggtcgcgtccggcgaataccccctcggcgtcctcccaggccgccagcggcaggctcgggcgggcatagaattcgtcacggttggcggcgaccagcagcggcagggcgtgccccggttgccaggcgaagacgatcaggcacatgcgcgatccttgggatgggctggccgtcaggctaaaggcatccgccatcgccgttcaagcacgacgcctgccgcacggcgcgcaattccgttaccatgccggctttccaacgggggcgtgcatggagtttctcctctatatcgtgctgggcgcctgtgctggcgtgctggccggactgttcggcgtcggcggcggcctgatcatcgtcccggcgctggtcttcagcttcaccgcgcacggtttcggcggcgacgtcctgacccagatggcggtcggcacctccctggcgaccatcgtcttcacttcgatcaattccattctcgaacaccatcggcgcggcgcggtgcgctggccggtgttcgcctggatgaccctcggcatcctcatcggcagtgccctcggcgcgctgaccgcggcgcagatcaaggggccgctgttgcagaagataatcggggtgttcgccatcctggtcgctttgcagatggttctcgacctcaagcccaagggtagccgcgaggtgcccggcaagggcggcctgaccctggccggcgcggtgatcggctgggcctcggcgatcttcggcatcggcggcggttcgctgaccgtgcctttcctcagttggcgcagcgtgccgatgcagcaggcggtggcgacttcctcggcctgcggccttcctatcgccatttccggcgctctgtcgttcatcgcggtcggctggcacaacccgcagttgccggagtggagcctgggctacgtctacctgccggcgttggtcggcatcgccaccaccagtatgctgttcgcccgcttcggcgcgcgcctggcgcatcgtttgtcgccgcgcgtactcaagcgactgttcgccctgctgctgttcagcgtgggcataagtttcctgacccccgatctcgcttttctgtcgtaggagttatcgatgctgacgtatccccagatcgatccggttgcgctggccatcggcccgctgaagatccactggtacgggctgatgtacctgatcgggatcggcggcgcctggctgctggcgtcgcgccggatgaagcgcttcgacccgacctggaccaaggagcgcctttccgacctggtcttctgggtcgcctgcggcgtgatcctcggtggccgcctgggctacgtgctgttctacaacctggacgagtacatcgccaacccgacgctgatcttcgaggtctggaaaggcggcatgtccttccatggcggcctgctcggcgtgatgctggcggtctggtggttcggcaagcgccatggcaagagcttcttccagctgatggacttcatcgccccgctggtgcccatcggcctgggcgccgggcgcatcggcaacttcatcaactcggaactgtggggcaaggtcagcgatgtgccctgggccatggtcttccccaacggcggcccgctgccgcggcatccctcgcagctgtaccagttcgccctggaaggcgtggcgctgttcgtcatcctctggctgttcacccgcaagccacggccgaccgcctcggtctccggcctgttcgtgctgtgctacgggatcttccgcttcgtcgtcgaattcgtccgcgtgccggatgcccagctcggctacctcgcctggggttggctgaccatgggccaggtgctctgcgtaccgatggtgctggccggcattgccctgatggtctgggcctaccgccgcgacgcggcgcagccgaaggcggcctgagccgcttttcgtgcccggagcggataacgtcgcaggcgtcatccgctccgggcagccggctttccgctccagggcgtgcatggcttgcgccggtcgcgccgaactggcgatgccggccccgtcgccgtagacttggccatccttctgtcatccctcggtgggagccgccatgtcggcgccgcaccgatatcgatccgagcctccgatgaaacagtacctcgacctgatgcgccacgtgcgcgagcacggcaccttcaagagcgaccgcaccggcaccggcacctatagcgtgttcggccaccagatgcgtttcgacctggccgcgggcttccccctggtgaccaccaagaagtgccacctcaagtcgatcgtccacgagctgctgtggttcctcaagggctccaccaatatcgcctacctcaaggagcacggcgtctcgatctgggacgaatgggccgacgagaacggcgacctcggcccggtgtatggctaccagtggcgctcctggccggcgccggacggccgccacatcgaccagatcgccaacctgatggcgatgctgaagaagaatccggactcgcgccggctgatcgtctccgcctggaacccggcgctgatcgacgagatggccctgccgccctgccacgcgctgttccagttctacgtcgccgacggcaagctcagctgccagctctaccaacgttcggcggacatcttcctcggcgtacccttcaatatcgccagctatgccctgctgaccctgatggtggcgcaggtcgccggcctgcagccgggcgagttcatctggaccggcggcgattgccacctgtacgccaaccacctggagcaggccgacctgcagctgacccgcgagccgctgccgttgccgagcatgaagctgaatcccgaggtgaaggatctgttcgactttcgcttcgaggacttcgagctggtcggctacgaggcccatccgcacatcaaggcaccggtcgcggtctgacccttcggcggagccgtcggctccgctcaaccgaacaggcgacggtaccagggaagcgcgcgccagtcccgcaaagcccgctccgcatcttctgcgcgttgcagcgcctgttccagggcctgctccagcggagcgaccggatggctcatggcatggccatggcagagctggaagtcgtccagcaggttcggcggtagcgcgaaggcgccttccaggcgggcctgttcctccgccaggtaatagccgttgaggccgtcgaagtggacgaaacggtagcccgcggcgagcagcggcgctttccactcggggtcgtggtcgaatggagtttccgcgaggatcagccacgggcgccagcggttcaggtcgaggccgcggagcaccgcgccttccagcccttcgacgtcgatcttgaggaagtggatcggcccttcgacatgggccgcgcagatcgcgtccagggtgctgaccttcacttcgcgcggggtagccgtgcagccctcggcctggcgctggcgggctagctcggggtccagggtggagagacccgaggcggccatctcgtagagcgtggcgcggccttcgcgctcgccaatggcgaggttcaggttgaggtcttccggccgttcccgctccagctcgcggtgcaggtggggcagcggttcgatgttgatgccgcgccagccgcgctcgtagaacgccagggtgaccgagtcgatccgcgggtggttggcgccgacgtcgatgtagaaccccctggggaagagtttcagggcccgccagagtcggacgtcttccaggttctgcgcgtaggaaacgaagggcatgggcctacctcttgggcgatcgtcgcccagtctgtcattccccgcgcccgctctccagcaattcggccagcgcgtcgatctgttcctggcggtcgctgccgcccacccgcctgccgttcagcgacgaccactccggatgcgcgcgcgccttgcgcagcgcttccggcagcttgccttcgcgccactgcttgtcctccggggtttccaggcggatcgcctcgaccgccgcgtggccgcgcgtttgcagggctgccaggagctgccgttggcgcagcgcgagcaagcgcagcacggcgtcgttgacggtcagctcgcgggcgcccttgagcttgccgagcaggcgcgagccgtagtggccgacggtctgccaggcgccgccggcgagggcaccgagggcggcggcggcgccaagggtgacgccgcccaccagcaggtcgatgccggcgccggccgcggcaccggccgcaaccccgccgccgaggcggataccgagttggcgcagggtctccggattgaacagatcgtcgccccagcggccgtcgagcagcggcaggtcggcggcgcgggcgtcgtccctggcgaaggcgtagagccgcagcaacgcttccacgcaggcctgctcgcgcttgcgcacctgctggtgcaggtcgcgggtggcttcctgcacggcgctttcgccgccgggcaccaggcgccggcaggcggcgacgtcgaccagcaattcggcgatcagccgttgcccggcgcgcaggcgcgcggcggcctgggtctcatggtcggcgatcagccggtcgagttgcggccgggcgcgctccagcagcagcgccaggctctcgtagaggcgccgctcgccgtccagcggcggcgccacgctgtcgaaacgcaccagggcgtgcaggcccaggcgagcgagggcggcgcgccactcctcctcgcgatgctgcgggctggcgacgaagttcagcaccggcagcagcggccggccgcagccggcgagcaccgccagttcgtcgcgatacttggccagcaccggttcgcgggcgtcgatcacgtagagcccggcgtcggaggcgagcaactggcggaccaccttggcttcctgttcgaaacgcccgcgcgcttcgttgctgtccagcaaccgcgccatgcgttccgggccatcgagacgctcgccggggcgctccagggcgtccaggtagtcgagcagggcgatggcgtcttccaggccgggcgtgtcgtagagttccagcagcgcttcgccgtccaccgacagcctggcgccctcgacgtggcgggtggtgctggggcgatgggagacttcgccgaatccacggtcgcgagtcagggtgcgcagcagcgaggtcttgccggtattggtgtggccgaccacggccaggatcagcggctcagtcatggccggtctccagccaggccagcggcgaggtctcgccgtgcggcagttgcaggcgttccagggcggcgtgccagtcacccaggcggtcgctgtcgagcgcttcgccgggcggagcctggagcagccagatgcgggtgctggcggcgcagcgggcgagttcgccgagcagtgccagggtgccgcggtccggcgagcgacgcgggtcgcaggcgatggccaggcgcgccggcgggtagcgggtcagttgttcgagcaggcgacggcgctgctggccgtcgtcgaggatgccggcgtcggcgacgccttcggcgagcttcggcggccagggccggcgatcgtccagctccaccgccaccagcaccgctccggcggcttcctggctggactggccgccctgcggctccggcagccagtccggtgccgcgtcgctgacgccgaggcgttcgctggccggcatcaagcgttcgcgcagcaggctgtagcctgggtcgtcgaggtccaggtcgaggtgggccaggccgcgtttccagcgccacaggcagagcagaccgagcagcgcgcgcggcaggaccccatagaccagcagtacgcctaccagccagccggcccaggcgtgccgtgcggcttcgctggccagggcggcgtcgccgctggcgcggatcagctcggcgtccggcaacgggaagccaagcaacgccggcagggcgccgagcgcctgggtaagggcgatgaaggtatcgctgccgagaatggtggtttcccagacgaaaccgtagcggcgggtcgccagcaggccgaggagcatggccagcgcggtcagcaggccgagcagccagagcccgtggaccagcgcgccgaggccccagcgcgccagccggcgccggccgagcaggaccaatagcgccggcgccaggtgcgcggcgcgggcatcgcgcgccagcttgccgctgagccacagccagagccggccgagcgcgcccgcggcctcgccgccggcgagcaggccgagggcccagccgagcagggtcagcaggtgcaggccgagtaggctggccagcgcccagaacacgttgaccgggcgctggccatcgccgagcgcggcgaaggccagtccggcgccgctggccagggccagcaccagcagcagggccagcgccagccgcgaaccctggcgccaggtccgctgggcgtcgagcaggccctcgcggcggcccagccagtgggcgcgggtgagaatacggcgcggcagggaaccgccctgggccagcgcctggcgaaccgcctcgctgtcttccagcggaccggcctgctcctcgcgcaggcgaacggcctcggtcagccagagggcgtcgaggccgggatgcgtcgtgtgactcaagtcacctcctgtgtcgatttccctgccgagcgtgaatcgtgcccggccaacggcgtctgatcagcgccaaacatagcaaaaagcgccccggcggctcatgctggcttgccagccggctggcggcggggtgtgggattttgactggcgccgtggcgaaagcgttcggcgccggtagcgagaggaacactgagatgaaggtagtacgccgataccccctggcgctgttgctggggatggcgggcgcgctggccgacgagttgcccgatggctccttgctgcaacgctatggcgtgcaggccgaccagttgccgaccctggcggcggatccgccgtcgcgcaaggaggagaaggaaacgccgtcgcgcttccgggtggagccggagcagcccttggtgacctttggcgtcaaggaccacaagggcatggaacccactggcaacccgtcgatcgacgccatgcacgagcgcgatcggcggatctgccggaacatcaggcggcaggcactggagaaaggcaaggcacagcccttcgacggctacatcgagtgtccatgaggccggcgcccgcgtacgagcgccggtcgggctgcgtcagcgctgctcgcgcaggcgcacggcgacgtccggctggtcgctgaacaggccgtcgatgccggcgtcgaggtaggccctgatctcgccggccaggtcgccgcgcgactgcgggttgccgtcggcgctgcggaactccgccggaaggaagctgttttccgcgcggaaggtgtagggatgcaccttcagcccggcggcgtgggcgtcgccgacgaagcgggtcggctggccgaggttgccgttggcatcgcggggaatcacgtagctcttgtccggaccgaccccgtaggcgtagcgcgccacctggcgcaggcccttggcggtggccatctcggcgtaggtcaggctgccgccggcagcctgctggtcgtagggctggccgctgccgtagagctggaccaggcggatgccggtgaggcgcttgagttccttcaggttgttcacctcgaaggactggatgaataccggcgcgcgcggaccgaggtagccgttgcggtgcagggtcttcaccagtgggcgttccatggccaggccgaggcgctggaagtgggtgccgtgcttgatctcggggtacaggccgatggtgcgttgctggctgatctgcaggcttttcaccaggtcgatgatctcctgcagggtggggatctcgaaggtgccgtccaggcgcgcattgcccgggcggatcgtggggatgcgctcgatggcgcgcagggtcttcagttcggcgagggtgaagtcttcgctgaaccagccggtgagttccactccgtcgactttctgcgtgcgcttgcggtcggcgaattccgggtgctgggcgacatcggtggtcaggcccagctcgttgtcgtggcgggcgactagcttgccgtcgcgggtcatcaccaggtccggctcgacgtagtcggcgcccatcatcaccgccagggcgtaggcgcccagggtgtgttccggtacgtaaccgctggcgccacggtgggcgatgaccagcggcgagcgttcgtcgctggccgggtggcgaacggaggcctggccctgggcccagtcgatggcgcgttgtacgttgccggtgtcggcgtgggcggcgctggccaggccagcggcgagcatcaggcaggcggcgccgaggtggcggcgcaggaaggctggttgcatgacgggtcctcgtcggcggttcgggagtgttccagtccagcagattgacgcagccaggtgatacttctttgcccgtttcgcgacattcccgtgacaatcgccgccagcgtgacgacgtcggcgttttcccggccaatccaacgaaaggggcggacggccggggcagggtatagggtgacggcgctcgcataacaataagaggatcggtgatggcttccgcgcaacctgcctccgcgtttccctgcctgtcgttgcaactggcctgcctgttgctgggcgcctggctggccttcgatgcccacggcggcggccaggccgtggcgccgccggcccgtgtcgaagcgcgtgtgccgacggccgctaccgatgactggggacgccagccggacagcctgatgagcgccgtgccgccgcgcacgctggaggcgagcgtcggcgcccgcggctcgggatcggcgagttcgcgactgtggatcgccgataccgacttccgcctgcacgacgacatcggtttcttcatccagcgcatgctgatccgcatggagccgactcgtcccggcgcgcccttgtcgctcgacgatccgacggcgatggtggcgcggatccaggccggcgagatattcgtcagcgacgccaccctggcgaccctgctcaaccaggacctcgccgcgtcccgcgcggccgtgcgcaacctcagtatgaacacccgcaaggacggccaggaagtgcgtggcgagttgttgcgcaaggggcgctggcgtccgctgcggatgctcaccgagatcgagctgagcggtccgctggaggtgaccctggtaccccggcggatcttcgtcgacggggtcgaggtcacttcgtcgctggcggcggcctcgatcgagatgtccgaggtgctgaagctgaagacccggcacatggaactggtcggcaaccgcatccgcgtcgacctcgacggtttgttcccgccgccgcgcctggacttccgcgtcagtcgcctggccctggccgacggcggcatgcaactcgccctcggcgactccctggccgacctgcaatggccggcattacgggcgccggacagctacatgttcatcgagggcggcgatatcaagatggcgcgcaccgtgctggtcaaggcctatgccctgttcaccagcctcagcccggggcagccgctgctgttcaatctctacgactaccggcggcaactgcagaacggcgtgatccgcctgcgcgaggacggcatggtgcagatcgccgtgtcgccggtgaaggcgccggcgccgctggaggcacggctgtgagccggcgtccgtggggcgtactgcttggctgttgcctgttggcggccagcgcggcccaggccgaaagcgccatcgaccggcagcagcgcgaactggccctgctgcgcgagggctggtaccggcaggtcccgccggcgccggtgccgctgcccatgcgtacggccgggccggcggattccggccaggatggtgtcggcatactgctgcgcaacgtggacatgtacctgcgcggcaacatcggtttccacgtgcccgaggtgaagggctggctggtgccgaaccgggccggccagccggtggacttcgaccgtccgcaggacatgcatttccaggtgatggagggcgaggtgctgctcagcccgcggcaactggccaacctgttcaacgagcacatcctcgcctacgacgggaccatgttgaaggacttccgcatgagcagtgcggcgggacgcctggaggtggaggggcgggtgcgtccgctcggcgtagggccctggctgccgctgcggctgggcggcggcgtggaggtggacgcggccagcggcgcgctggtctatcggcccgaccagttgagggtgatcggtctgccgctgtacggggcgatgagcctggtcggcctgccgatgtcggcgctggtcagcctcgatcggccgggggcgagcctggtgggcagcgccatgcgcctggactaccgcaaggtcttcccgctgctgggcatcgacggccacgtacaggaggcctggctcgacgaccaggggctgcacctgcgtttctcccaggcgcccggccagccgtcgccggtgttcagcccgccggccgcggcgggcccatccttcctctggctacagtcgggcgacctgaagatcttcgaaatcctcatcacctacgcccaggtgctgctgaagaccgagaccccggaccaggtgctgaccttcaacctgcaggactaccgcaaggtgctggcgaccggcaccacccaggtcaacgaggatggcaccttcttcatgcaggtgccgccgtatgccaatcccttgtaggccggcccgcacagttggcctggagtccgccggcgcgagtgtttatcctcgcgcctttgtccttccacgatgaggtaaccccatggcacgaccgctggcgatgatcgccgcccttggcgagaaccgcgcgatcggcatcgacaaccgcctgccctggcgcctgccggccgacctcaagcatttcaaggcgatgaccctcggcaagccggtgatcatggggcgcaagacctgggactcgctgggtcggccgctgccgggccggctaaacctggtggtcagccgccaggccggcctggcactggagggtgcggaagtgttcgccagcctggacgccgcgctggcgcgcgccgaggcgtgggcgcaggcggaggacgccgacgaactgatgctgatcggcggcgcccagctctatgccgaggccttgccgcgcgccgcgcgtctctacctgacccgggttggcctggcgccggagggcgacgcctttttccccgagatcgatggtgcggcctggcgcctggcgtcgagcatcgaacacgccgcggctgacgatgcgcctgcctacgccttcgaggtatgggagcgccgctgacggttccaggcggggtcagagggtgatcagctccgcctcgatcttcttccccgccacttccagcacgccgatcccgatcggcaagctgaagcgccgcggcccggcgctgcccgggttgaggtagagcacgccgtcgcgctcttccttcagcggcttgtgcgaatgtccggcgaccaccacgtcgatgccttcggcggccgggtcgaggtcgagtcgcttgaggtcgtgcagcacatagagggtcagccggccgatcttcagcagcaggcgctcggggatgtccgccgcccagtcctgggtgtcgttgttgccgcgcaccaccgagagcggcgccaggcgttccagctcggcgaggatttccggcttgccgatgtcgccggcatggatcaactggtcgcagccgcgcaaccgttccagcgcctcgggccggagcaggccatgggtgtcggcgatcaggccgatgcgcaacgggcggcgggactggggcatgggcgcgggtccgggttgcgggacggaagagggtggccgacgggcatggccatgccgtcgatcatacccaaccattggccgggtacgaaaacccttcggcgaaaaccacgacgccacccggaggtggcgccgcgcctatcagtgtccggccttctggaccgggctttccggcaggaaccagttcagcagcagggcgcagatgccgccggtggcgaccccggactccagcacgttgcgcagcgccgcgggcatgtgcgcgaggaactccggcacctgcgaaacgcccaggccgagggccagggatacggcgatgatcagcagggcacggcggtccagctggatgccggcgaggatgttgatgcccgaagcggccaccgcgccgaacatcaccatcgccgcgccgcccagtaccggttccggcaccgcctggatgaccccggcgacgctcgggaacaggccgagcaggaccagcatggcggcgatccagaggccgacgtagcggctggccacgccggtgagctggatcaccccgttgttctgggcgaacactgagctggggaaggtattgaagataccggcgaggaacgagttggcgccgttgaccagcacgccgcccttgatccgctgcatccacagcgggccttccaccggctgcttcgacaccttgctggtggcggtgacgtcgccgatggcttccagggaagtgaccaggtagatcaccagcatcgggatgaacagcggccaggagaagtccaggccgaagtgcagcggggtcggtacctggaacagctcggcctggtgcatgccggtgaagtccaggcggccgaggtagccggccagcgcgtagccgacggccagggcgatgacgatggcgcaactgcgcatccataccaccgggatgcgattgagcaccacgatgatgcccagcaccacgccggacagcagcaggttctcgccgttggcgaaggtgccgttggacatcgccgagaagccgccgcccatgctgatcaggccgaccttgatcagggtcaggccgatcatcagcacgacgatgccggtcaccagcggcgtgatcagccgcttgacgaacggcagtatgcgcgagatgcccatctcgacgaaggagccggcgatgaccacgccgaagatcgccgccatcacgctttccaccggcgtgccctgcttgaccatcagcgccccgccggcgatcagcgggccgacgaagttgaagctggtgccctggacgatcaacagtccggcgccgaacgggccgaagcgcttgcactggacgaaggtggcgatgccggagatcaccagcgacatcgacacgatcagattggtgtcgcgcggcgatacgcccagcgcctggcagatcagcaggccgggggtaacgatcggcacgatgatcgccagcaggtgctggagggcggcgagcagggcgatgggagcgctgggacggtcgtccaggccatagaccaggtcgttgcgggcgctggcgtccgacgggctttgcagggaactcatggtggcggtccggggaaaaagagcgcgattttactgggcgaacacggtctcgcccaggcctggctgcgccgcatgtcggcggataacgccggtggcgtatgcgccctgcggttggagcgtgggtgagcggtagggcgaatgaccgcttgcgattatccgccattcggcgcgcgtacgcgtgaatgaaaaagcccggcgcgggaccgggcttttttcgtcgcgggacgattcagccgtccagtagcgccttgttgcgtaccgcgcccttgtcggcgctggtggcgagcagggcgtatgccttgagcgcggtgctgacgcggcgggcacgcggcgcggccggcttccagcccttcttgtcctgttcggcgcggcgtgcggcgagttcttcgtcgctgaccagcaggttgatcgagcgattgggaatgtcgatcagcaccttgtcgccgtcctgcaccaggccgatggcgccgccggcggcggcttccggggaggcgtggccgatggacaggcccgaggtgccgccggagaagcgtccgtcggtgagcagggcgcactgcttgcccaggcccttggacttcaggtagctggtcggatagagcatttcctgcatgcccggcccgcccttcggtccttcgtagcggatgatcacgatgtcgccggccttcacatcgtcgccgaggatgcctttcaccgcggcgtcctggctttcgaagatcttcgcgctgccttcgaacacgtggatcgactcgtcgaccccggcggtcttcaccacgcagccgtcgagagcgatgttgccgtagagcacggccagcccgccttccttggaataggcatgctcgacgctgcggatgcagccctcggcgcggtcgtcgtccaggctcggccagcgggtgttctggctgaacgcggtctgggtcgggatgcccgccggaccggccttgaagaaggtgtgcacggcttcgtcgcgggtctgggtgatgtcccactgggcgatggcgtcggccatgctcgggctgtgcacggtggggacgtcggtgtgcagcaggccaccgcgggccagttcgccgaggatggagaagatgccgccggcgcgatgcacgtcttccatgtggtacttctggatgttcggcgccaccttgcacagttgtggcaccttgcgcgacaggcggtcgatgtcgcgcaggtcgaacggcacctcggcctcctgggcggcggccagcaggtgcaggatggtattggtcgagccgcccatggcgatgtccagggtcatggcgttctcgaaggccttgaagttggcgatgttgcgcggcagcacgctgtcgtcgccttcgccgtaatagcgctggcagagttccacggccaggcgcccggcgcgcaggaacagttgctcgcggtcggcgtgggtggccagggtcgagccgttgcccggcagcgacaggccgagcgcctcggtcaggcagttcatcgagttggcggtgaacatgccggagcaggagccgcaggtcgggcaggcgctgcgctcgtactcggcgaccttctcgtcggagcaggagtcgtcggcggccaccaccatggcatcgaccaggtccaggccgtggctggccagcttggtcttgccggcttccatcggcccgccggagacgaacactaccgggatgttcaggcgcagcgccgccatcagcatgccgggggtgatcttgtcgcagttggagatgcagacgatggcgtcggcgcagtgggcgttgaccatgtattccacggagtcggcgatgatctcccggctcggcagcgaatagagcatgccgtcgtggcccatggcgatgccgtcgtcgacggcgatggtgttgaattccttggccacgccgccggccttctcgatctcgcgggcgaccagttggccgaggtccttcaggtgcacgtggccgggcacgaactgggtgaaggagttggcgatggcgatgatcggcttcttgaagtcttcgtccttcatcccggtggcgcgccagagggcgcgggcgccggccatgttgcggccgtgggtggaggttttcgagcggtaatcgggcatgacgatttcctgcggctaatcaggttcgggttatgactgtatcgtgagcgtcgaaggaaccggatgcaaacggggaatagccgagtgtacggagttggccggggtctgaatggggtcaccattggcgacggcctgggctcactgcccgccaggggatgattggcgaggaatgcccggattctaagcccagagcgggcgaatggggaaggctggcggtcggcggagcggtgcgtcgcgacccggctggcgtcttgcgccgcccgtcgcgccatgagcggcggtggccgtagggcggatgaacgcaggcgctcatccgccgggacgggctcagccgttgggcagcagccggcaggtcaggctcttgatgtagcgggtttccgcgatcgccaggtgcaccggatggtcggggccctggccgccgcgctcgagcagctggatgttacggtcgagatggcgggcgctgccgatcaggatgttctgcaggtcgtcctcgggcaggtgcatcgagcaggaggcgctgaccaggatgccgtccttgctcagcaggcgcatggcctgttcgttgagacggcggtaggcggcctcgccgttcttcaggtccttcttgcgcttgatgaaggccggcgggtcggcgatcaccacgtcgaagcgttcgtcggcggccttcagctcgcgcagggcctcgaacacgtcgccctcgacgcaggcgaccttctccgccacgccgttcagtgccgcgttgcgctcgacgccgtcgagggcgaaggcggacgcgtccacgcacatcacttcgctggcgccgaaggcggcggcctggatgccccagccaccgatatagctgaacaggtcgaggacccgcttgccccgcacgtagggcgccaggcgcgcacggttcatgcggtggtcgtagaaccagccggtcttctgcccggccagcaccggcgcctcgaacttcacgccgttctcttccagggcgacccactccggcacttcgccgtaggcattggccacgtagcgctccaggccctcggcgtcgcgcgcgctggagtcgttcttccagagcacggcggcgggcttgagcacctgcagcagggcggcgagcacctcgtccttgcgcagttccatggctgcggacgccagttgcaccaccagcacgtcgccaaagcgatcgaccaccaggccgggcagcaggtcggaatcgccgtagaccagccggtagaacggcttgtcgaaaagccgctcgcgcaggctgagggcgatgttgatgcgatgaaccagcagcgatttgtcgagaacgtgcttggtatcacgggaaatgaggcggccgcagatgagattgttcgggctcagcgcgacgatgcccagcggcttgccgttggccatttccagcaccgcctggtcgccggcggcgaaggcattcagcggcgtcgcggcgacatccacctcgttgctgtagacccacaggtggccggcgcgcaggcggcgctcggcgttggctttgagacgcaagctgggcagggtcatgggaaaggctccggcaaaagagcgcgattatagcgcagcgacgggattcgccgctgcgcgaacgcgggccgttcagccggcgaggatttcgatgaatcgacggttgaaggccgggatgtcttcgggtttgcggctgctcaccagcttgccgtccaccgctacctcctggtccacccagtggccgccggcgttgttgatgtcgtccttgagcgacggccaactggtcagggtacgaccctgcaccagtccggcggagatcagcagccaggcgccgtggcagatcaccgccaccggcttgctcgcctgttcggcgcggatcgccagttcctgggccttggccaggctgcggatctggtcggaattgatcaccccgccgggcagcagcagggcgtcgtagtcgtccaggctggcgtcttcgaaggtgccgtcgacgcggaaggcctcggctggctggtgatggttccagccgcgcacctcgccggccttgtcggaaagaatccttaccgtggcgccggcgtcttccagggcttttttcggaccggtcagttcgacctgttcgaaaccgtcggtcaccagggcggcgacgaccttgccgtgcagggattgggtcatggcatgtctcccgatatcagaaggggtattcattccgaccctggcggctgcgggaaaagttccatgtccgttgcctggcgccgcttttccggcagaagcccgccccatggcggggttctccgggtaaactgcgcgcaccgtcaactttcgcctccgtcctcatggtccaagaactcaccgccgagcagatccgccaggccctgcaaggcatcagcgtgccgccgcaaccccagatcatggtcgacctgcagatggagcaggtcatgcccaatccggacctgaagaacattgccaggctgatcagccaggacccgggcctttccggggctctcctgaaactggtgaactcgccgttcttcggcctggccaatcgcatcacttcgatccagcgcgcggtgaacctgctgggcagtcgttcggtgatcaacctgatcaacgcccagtcgatcaagggtgagatgagcgacgacaccatcgtcaccctcaaccgtttctgggacaccgctcaggacgtggccatgagctgcctgagcctggccaagcggatcggctacgaatcggtggacgaagcctacgctctcggcctgttccacaattgcggcatcccgctgatgctcaagcgcttcccgcactacatggcggtgctggaagaggcctacgccgccgccagcgacgaacgccgggtggtggacaccgagaaccgcgtgctgaacaccaaccatgcggtggtcggctactacaccgcgcgctcctggcgcctgccggagcacgtctgcgaggcgatcgccaaccaccacaacgcgttgtcgatcttcggcgacgaatcggcacgcgatacccaactgaagaacctgctggcgatcctgaagatggccgagcacatctgcggttcgcaccgggtcctcggcaaccagccggaagaccacgaatggaacagcatcggtgcgctggtgctggactacgtcgggctcaccgactacgacttcgagaacctcaagggctcgatcctcgagctgggcgtcggccagggcagctactgactggccgcgccgcggcgcttcctgctaaggtgccgcggtcaaccggattgctgccgccatgcccgaactacccgaagtcgaaaccacccgccggggcatcgccccctacctcgaaggccagcgcgtcgagcgcgtgatcgtgcgcgagcggcgcctgcgctggccgattcccgaagacctggacgtgcgcctgtccggacaacgcatcgtcagcgtcgagcgccgcgccaagtacctgctgctgggcgccgaggccggtacgctgatcagccacctgggcatgtccggcagcctgaggctggtggagagcggcaccccggccagtcgccacgagcacgtcgacatcgagctggcctcgggcatggccctgcgctacaccgatccgcggcgcttcggcgccatgctctggagcctggcgccactggaacacgagctgctgcgcaacctcggcccggaaccgctgaccgacgctttcgccggccagcgtctgttcgagctgtcgcgcgggcggagcatggcggtcaagccgttcatcatggacaacgcggtggtggtcggggtcggcaacatctacgccagcgaagcgctgttcgccgccggcatcgatccgcgcaagcccgccgggagcatctccaaggcgcgctacctgcgcctggcggaggagatcaagcggatcctggcgatcgccatcgagcgcggcggcaccaccctgcgcgatttcgtcggcggcgacggccagcccggttacttccagcaggaattgttcgtctatggccgtggcggggagttctgcaaggtctgcggcagcaccctgcgcgagatccgcctaggccagcgcgccagcgtgtactgcccgcgctgccaacgctgaagcgccgcgccgcgcatactctaccgccacaagaagggccgccacggtgagcggcctgccataagaaaggtgcacgatgtccggcaattacctgcctcgcaacaccctggtcgagtcgctcggccatgccatgctgaaactctccggctggaagatcgagggccaattgcccgcgctcgacaagttcgtggtgatcggcgcccaccacacctcgaactgggacttcgtggccttcctcgccgccaagttcgtcctgcgcctgaacgcccgctggttcggcaagcacaccctgttcaacggcccgctgggcggcctgatgcggcgctggggcggtatcccgatccagcgccacctgaagctgaataccgtggaccaggcgatccaggccttccgcgagcaccgcgagttcatgctgatcatcgctccggaaggcacgcgcaagaaggtcgaccgctggcgcatgggcttctaccacatcgcccgtggcgccggcgtaccggtggtgccggcggcgctggactacgaaaaccggcggatcgtcatcggcgaacccttctggccgaccggcaacgaggacgccgacctgtgcagcctgatcggcttctaccggccgttcatcccgaaaaagccgcactacgcattcctcggcgattgaaggcggtcacgctggcactacccgcagcgctgttatagttaggcgatatctgcccaaccaaaaaccagaaaggaccgcctccatgaacctgtttcgcaccaccgcgctcgtgctggcgctgaccaccgggctctcgtccatgcccgcgctggcggatgccgtgcaggaaaacgccagcggcgacccgatgtacaccgtcgaagcgccccccgcgtacgccatgatcggcgatctgctcatcgcccgtcccttcctgatcgccgccacggccgtcggggcggtggccttcgtggtcagcctgccgttcaccgcggccagcggcagcgtcggcaaggccggccaggcgctggtggtcgatccgggcaaggaagcctttgtccgttgcctgggctgcaccaccagcggctataaccacgacgaaagctgagtttccaacggaatgaaaaaaagccggtcatcgaccggctttttgttttctcgatgcattgcagggggcacggagattgggctaagtcttttcttccgccacggcaggcggcagctatagcgccgtatcggccgatgacagatgttccgcacggaccgttcgcggcacttgatcggactctccgatggtgacagtgtcctgctgaccagcaaggtcacaaggtcgaccaggggtggccgaccggctcaaccaagataaggatttcgcgtatgttcagtcagtgggtgttcctgtccgtccttgctcttgccgtaccctcgttcgcctgggcggaggatgcggtgtccgacctcgccaaggagcagtccaaggccgagcagggcgacaagcgcggcgatgaactgttcgccgaattcacccgcctccgccaggccgccgagacgggggagccgcaggctctgttcgatttcggcgcctacttctaccagcaacagaactacgccagcgcgcgcgaatggtggggcaaggcggccgctgcggggatggtccgcgcgcagatccaactggccatgctctatcgcgatggtgacggcgggccacaggacaagaccgaggcggcacgctggttccggaaggccgcggagcagggggatgccgccgcccagaatgaaatgggcgttctctactggagaggcgaaggggtcgaccaggaccgggtgaaggccgggacctggttcgaacgcgcggcggccagcggtagcgaagacgccgaaaccaatctgggatggttctacctggacgactcgcaaggcgtctattccgccacttcagacgaggaagccgccctgctggaccgttatgccggcagccgggaaaaggccttccactggttctgcaaggctgcgacccagggagatgcccgtgcccagttcaaggtgggcgaggcctactggaacggttccggtgccgggatgaacaagctgcaagcgcggctctggctggaaaaggccgcacagcagcaggatgcggatgccattgcctggctggagagcgccgcgaacgcagcctggtacacccgcctggaaaactggattcatgctgcgctggatggagagctgtccggtgtcgccgactgctccggtgccgccgatcgccggcactccggccgaggcatggagggcgccccgtctgacccggaggcggtggaagccagtgcggaggatgcgcagcaggcggttgaagcggcgagccagtgaggcacgccgcctggattgccagctggactcgtcggcgaaatccctacgcggcgcctatctgggtgagatcgtcgaacattttttgagcgctgtctctcgtttgttcagtgcggccgaggctgcgcttgcgcctccagggacagagacgagtagccgatcccgcgcgggtcgctggcggcgtcgacgcggccgctgcgcttgtcccagtagagcacctgctggttgccgtagctgcgctccaggcgtttgagctgatagccgcgccggcgcagttcggcggcctcggcatcgctgaaggcgcgcggttcgtactcgacgacgtccggcttgtactggtggtggtagcgcggcgcggcgacccattggccgaccgggcggccgtcgaagtactgcagcatggagatcagcaccatgctcgggatgcggctgccgccaggggtgccgaaggcggcgaagtcggtcgggctttccaggaagctcgggctcatgctcgacagcgggcgcttgccggccgccaccgcgttcgcctggctgccggccaggccgtagctgttggcgccctgggtgtcggcggcgaaatcgtccatctcgttgttcagcaccacgccggtaccgggaacggtgaaggcggcgccgaacggcaggttcaccgagagggtggcggccaccgcgttgccctgggcatcgatcaccgcgaagtgggtggtgtggtcgccttcgcgccaggccggcgcctccggcagcgccgagctgggcgtggcgcggcgcgggtcgatgccggcggcaaggcgcttcaggtagtccggcgccagcaaactgggcagcgggttggcgacgaagtccgggtcgccgagcaggcctcgatcgcggtaggcacggcgcaggacctccagcacgtaatgggcacgctgtaccggctcggccttctgccacggcagctgttccagcatctgcaggctctgcgccagggcgacgccgccggccgagggcggcggtgcgctgatcagttcgcggccgttggccagcttcacctccagcgggcggcgttcgatcacccggtagtcgcgcaggtcggccgcgctccagatgccgccgccggcgcggaccccggtgagcagcttgtccgctgtctcgccttcgtagaaaccgatccgcccgtagcgcccgaggcgttccagggtacgtgccaactgcggttggcggagcaggttccattcgtcggggattccgcccttgtcgaggaagatccgcgcggtttccgggtccttgcgcatcgcttccaggcgcatggcggcgcggtcacggtagatccggtcgacggatacgccatccaccgccaggcggatcgccggcaccaggttgtcggccaggggcttgcgtccgtagcggctgctcaattcgaccagcgccgccggcaggccggggatcgccgccgccagcgggccgtcgacggacagcctggggtcgaccttgccattgcgccggtacatgtcggcgtaggcggccttcggcgcgcgctcgcgggcgtcgaggaagcgataggtcggctgcgcaccggcctggcgcagaaggaagaatccaccgccgccgagtcccgagccgtaaggctcggctaccgccagggcagcggcgatggccgccgcagcgtcgaaggcgttgccgccattggccagggtttccaggccggcgacggtcgcggccggatgtggcgtggcgacggcggcctgctgcggtgcgtgggcgtcgccgcgaaagctgtcggcatgcgccgcgaggctgagcagggacaggccgcaggcggcgaccagggtacggacgggcaggttcaggaaggacatggcggctcactgttcagcggcgttcgcgggacggggccgcgaacgcctcagactggattgccaaggatagccaaaagcgcgtcggacggggcgcgaaccgtccctgaagggcaggcgccggcggggatcaggccttgccggtgatcttccggtatttctccatcaactggtccttgctctcgacattggcgtcgtcaaggggaatgcagtccaccggacagacctgctggcactgcggctcgtcgtagtggccgacgcactcggtgcagagattgggatcgatcacatagatttcttcgccttgcgagatcgcgccgttcgggcattcgggttcgcagacgtcgcaattgatgcaatcgtcagtgattttcagggacatctaacaactccaaccgcgacggacagccacggcatcggtaacgggaatagcggaattgtgccgcatcggcgcccgcagtgcacgcgggacgccgacgggaggccggcggagagacgcggatcagcgcttgaaacgttccgccagggcgtctgccacggccggatgcacgaacttgctgatatccccgccgagagcggcgatttcccggaccagcgtcgaggaaatgaaggaatacttctccgacggggtgaggaacatgctttccacgtcgggggcgagctggcggttcatgttggccagctggaactcgtactcgaagtcggaaaccgcgcgcaggccgcggaggaagacattcgccttctgctccttgacgaagtgcgccagcagggtggagaagcccaccacctcgacgttcggcaggtgcttggtgacctcctgggccagcgcaacccgctgttccaggctgaacagggggttcttcttggggctggcggcgaccgcgatgatcacatggtcgaaaagccgtgaagcacgttcgatcagatcgccgtgacccttggtgatgggatcgaaggtgcctgggtacagcactcggttcatcgctacgtcctggcagggtttcgtaagggaatcggatggtagcgcagggatgcccgtgcggccaagacgcacgggccatcggcctttagcccataggtctgatggcgccgggccggctgccgcggcgcgcggccggcccggcggcggcggttcaggccctggccaggcgttcggccagcgcgctggccagttgcgcggtaagaccgtagaccgagagctgcgggttggcgccgatgctggtggggaacagcgagccgtcgtggatcgacaggttccgcaggtggtgatggcggccgaggctgtcggccaccgccacggccgggtcttcgcccatggcgcagccgcccatgacgtgggcgctgcccaggcgcgtgcggtagatctccaggcgcaggccgtcgatgatcccgcgcgcctcctgcaggttcttcgcgctacgcgcgtcgctgtgcaccggccgcacttcccgggcgccggcggcgaactggatctccgccatggtatggaaggcacggcggataccgtcccaggtgtagtcggtcatccggtagtcgagcactggggtgtcgtcgccgcgcaggccgaccgagccctccgcgctgtccgggtggaagccgtcgcggagcagggcgagcatcatgttggtatgcggtagctgttccatgcgcagggcgttgtcgctgccgaagccgccgagcagcaccgaggccagcgacggttgcagcggcggcacctccagtttgtaggacatgcgtccggtgacaccgtcgtcccattggaaatggtcggagtagatcgactgcggtgcgccgtagaaggggttgatcacccggtcgaacagccccgcgctgaaattcaccgtgtgcaggaaggtgcgcttgccgacccgctggctcggatcaggcgccttcgagcggagaagaatcgccggggtgttgatgccgccgccggagagcacgtagtgcctggcccggaccctgatccggcggccgttgggcgccacgcagcgctcatccatgcccaggcattcgaggcccgtcaccttgtcgccgtccagcagcagccggttggcgcgcgccaggtagagcagctcgccacccttgtcgagggtcgccgggatggtggtgaccagcatcgactgcttggcgttgaccgggcagcccatgccgcagtagccgaggttccagcaaccgaggacgttgcgcgggatgaccttccagtgatagccgagcttctcgcagcccaggcggatcacgtcgttgttggcattcggcggcagcgcccagggcgccacgtgcaggcgctgctccattttctcgaaccagggcgccatgtcctccgcgctgtggcccttgaccccgtagacctgggcccagtgctgcagggtcggttccggggtgcggaagctgctggtccagttgatcagggtggtgccgcccacggcgcggccctggaggatggtgatggcgccgtccttgctcatccggccgatgccttcctggtacagctcggggtaggcgtcggcctcctgcatcttgaaatcgctgctggtcttcagcgggccttcttccaccagcagcaccttcaggccggcggcgctgaggatttccgcggtggtgccgccgccggcgccggtgccgaccacgaccacgtcggcctccagctccaggtcgtcgtccaggcgcgagccgttgtaggttttccagccgcgggcgaggccctcggcgaacagatcgggtacaggcatgaatgcactctcaggctaggcggcttcgggctcttcgtattgttccgggggcggctcaagcgatcttcggcggtccggggtagccacaatgggcccacgcctcggggcgggcgtaccaggccatcatcgccagttgcatcagcgaactgtggcccatccgcaacaggccgatgaagctgttttcccagcgcgaaaggaatgcccgcacgtcgtcgccgctggcgttctcccaactgccccagataccggtcagcgggccacgggtgagcggcagggcgagcacgtcgaagagttgctgggtgagcttgaacatctccggggagagccgcgccaggttgtggtcgaggctctggatcgcgccctccacggctttcggcatctgctcggcggaaaccgcgccgagcagcatcaccggcagcagcgcacggaggaacggcaggtcggattcgcggaccttttccaggccgctcgccggtttctccgccgaacagccggtgaggctggcggtgacgcccgcggtggcgaggaaggcgccgccgatcaggccgactttcatcaggctgcgtcgggacaggccggcgctttcaagggtggtgtcgctcattgttgttatgtcacctgcagcgtaggaatgagggggcgccgcacgcgccccggttcagcgcacgaacagcttgtagacgagcttctggatcgacttgccgtagggggggtagatcattcgcgcggcgttgaagcgcggcttgctgaacacgcccttggccttgctgaaggtgaggaagccttcgtggccatggtagtggcccatgccggagggaccgacgccaccgaacgggatgtcgtcctgggcgacatgcagcagggtgtcgttcagacacacaccgcctgagtgggtctcgtgcagcacgcgctgctgctgcgccttgtcgtagccgaagtagtacagggccagcggtcgcgggcgctggttgacgtaggccagggcgtcttccaggcgctcgtaggggatcaccggcagcagcgggccgaagatttcctcctgcatcactttcatgtcgtcgctgacgttcagcagcagcgtctgcggcaggcgccgttgctggccttcggcgaacagcgggacgagggtcgcgcccttctcgcgggcgtcgtcgagatagccccggaggcggccgagctggcgctcgttgatgatcgcggtgtagtcggggttgtccgaaagacgcgggaagaagccctggaccacctccttgtactgactgacgaattcctcgacgcgccggctcggtaccagcacgtagtcgggcgcgacgcaggtctgcccggcgttgaggctcttgccgaaggcgatccgctcggcggcgtccttcatcggcacgctgtcggagacgatcgccggcgacttgccgcccagctccagggtgaccggggtcaggttctcggcggcggcgcgcatcacgtgcttgccgacgctggtggcgccggtgaacagcaggtggtcgaacggcagcttggaaaaagccacgccgacgtctacctcgcctagcaccacggcgacctggtcctcggggaagatccgcgccagcaggtccttgagcaggcgcccggtggccggggtcgactcgctcatcttgatcatcacccggttgccggcggcgagggccccggtcagcgggccgatggagaggaacagcggatagttccaaggcacgatcaccccgaccacgcccagcggctggtacaccacctgggccgaggccggctggaattgcaggccgaccgcgcggcgcgcgggcttcatccatttcttcacgcgcttggcggcgtagtggatgccgtgcaggctgggcatgatctcggcgagcagggtctcgtcggcggagcgcgcgctgaagtcccggtcgatggcctcgatcagtgcctgctgttccttgaacagcaggtcgcgcagggccttcagccactgcacgcgctgcgtggcgtcgggcatcggctgcgccaggtaggcggcgcgctggcgggcgaagagggcttcgagctggttgatttcctgctggctctgctgcaggtaggcgatatcggcgaccatgggctggctcctcggcgaagcgtgggcggctgcgtggccgcgcgtctgtcgttatggcggacctggttcggtccgatgaatttcgctgcgtcgctggatttctagagtaaatactctaaactgtcaaacagcatgcctgccagcccggcgcttgcgtacccaacgaaaggcgggccggtctcgggccgccaccccgggggctgacccgggcggccggctttgtgtaccttctacgctgtcacggcggggcgcgccccgcactgttacccgaacgagcccgtcgtccccatggcaccacgcatcaagacccgcgatcgcatcgcccaggccagcctggaactgttcaacgcccagggcgagcgcagcgtcaccaccaaccatatcgccacccacctgggtatatcgcctgggaacctctactaccactacccgaacaagcaggcgatcatcgccgagctgttcgccgagtacgaaagccacgtcgagagcttcctgcgcctgcccgaagggcggggtctgacggtggacgacaagaccttctacctggaagcgctactggccgcgatgtggcgctaccgcttcctccaccgcgacctcgagcacctgctggaaagcgacccggagctggcggcgcgctaccgcgccttcgcccagcgttgcctggtcaacgccaaggcgatctaccggggcttcaccgaggctggcatcctgcggatgaacgagacccagctggaggccctgaccctcaacgcctggatcatcctcacctcctgggtgcgcttcctctgcaccaccctcgatctcgacggcgacctcagcgaggcgcaactgcgtcgcggcatctaccaggtgctggcgctggagagcgggcacatcgaggcgcaggcccaggatgcggtggacgggatttccgagcggctctacgtgccgctctgatcgcgcagggttttctccagcacctgctggatgtggatgccgtggcggcggaagaaggcttcggtaccgagggtggcgtcggtgaacaggtaggcgccgcggtgatcctcggcgaagcgccgcagcagggctgcgccgacgccgctgctctgtgcgccgggcagcacggcgatttccgccagccagacgcgaatcggtgtttcttcctcggcgcgcagcaggccgaccaggcggccgtcgcgttcggccagcagggaatacccggaatgctggtacagcgtgcgtagctcggcaggcggcatgcgccggtcccagccgaccgccgcgtggatcgccaggatcgcctcgcagtcggcgtcgtcgagcatcgggttgtgccgcagcgtcagttccattcgcccccctttttccttcagcctgttcctattctgccgcccgtcgccggacgccggccagctcagtgctgccgcaggcgggcctccagccagtcggggatgcgtcgttccaggtagtaggtgggctggcgcggagagccgtcgacgaagccgacgtgacctccgcgggcgtgcagctccagctcggtgcagggtgccagttcgctgcgatcgggcaggctgcgggcgaacacgaaggggtcgtcgctggaatggatgatcaggctcggcgtgcggatgtccggcaggtagtagcggctggacgcgcgccgatagtaatccctggcgtcggcgaagccgtgcagcggcgcggtgacccggccgtcgaagtcccagaaggtgcgcatgccctccagcggaccgaggcgttgcagggcggccaggccttccgcctggccctgctcgccgaacagccgctgcttgtcctgcacgtaggccagcatggccttcatgaagtgcgcctggtagacccgggaaaagcccaggccgatgcggtcggcgcactcgtccaggcggaacggcaccgacaccgcgacgccgccgagcagcgggcagtccccagcggtttcgcccaggtacttgagcagcacgttgccgcccagcgaatagccgaccgcgtacagcggcgcttgcgggcgcctggcgcgcaggtgcgcgaccacctcggcgaggtcgtcgctgaccccggaatggtagccgcgcggcaggcggttcggctcccccgagcaaccgcgccagttcagcgccacgctggcccagccgcgctccagcagggcgcgctgcagaccgaggatgtagtgcgacgaggatgacccggtgaggccgtgcagcgccagcaccagcggggtctcggcatcgtgcgggccggcccagtcgaggtcgatgaagtcgccatcggccagccacaggcgttcgcgctgccgttccagggtcggcccgcggcggaagaacgggctccacagggtctgcaggtgcggattgggcagccaccaggcgggctggaaggtcggggacgcggtcatgcgcaggtcatgggcggtggtggtgtggccaccagcttaccagccgaactcgtcggcgaggtcctccgcccgctggcgcgaaccgaggatcggttgcagttcgtcgacgagctgctgccgatagcggggcgcgacgctgcagtcgtccagcaggatgtcctcgccggcgccgctccagacctcgccgaagcaggccaggctggccgccatctgccacaggtcgtcgaagcacggcgccgggtcccagcccctgccgccatgcaggtcgaagagtatgcgcccgctgccggtctcgaggatgaacgggtcggcgccctggtcggccaccaccagccagtcgtcctgccagcccgacaggcgctcgccgctgatgccgtgccagcgatagccggcctggcgctgccagaggcgggccagggacggcaggaaaaatgggttgccggcactctccagggtgcagtcgagtgggccgacctcgcggtagaaacgctccagctcggcgggcagggcgatatcgccctgccagtcggcggcgggttgcgccgcgcaaggctcgccaagcgccagcaggcgttggcgaatgctcgcggaagccgggctcatcctcaggctccccgctgccagagcgcgtaatgtacgttgccggctttcttttcccggtgcagccgccagtttccgggcaggccgagggacgaggggacgctctcgctctcggtatagatccaggcgtcggggttcagccagccgcgggtttcgagcaggcggcaggcgtcctgcagcaggttctgatggaacggcgggtcgaggaacaccaggtcgaaggcgctcggagcctggtttcccaggtagcgcacggcatcgccgaggaccagttgggcggtgccgcacttgagcgcgtcgaggtggttgcgcagggccgccaccgcttcgccgttggtatccagggccagcccttcgcgggcgccgcgcgacaacgcctcgaggaacagcgcgccgctgccggcgaagggatcgagcacccgtgcgccttcgacatagggtgccagccagttgaacagggtctcgcggacccggtccggggtcggtcgcaggccgggcccgtcgggaaagacgaaacgccggctgcgccattcgccaccgatgatccgcagctgtccctggccgccgtggcggccgggggctttcgcagtaggtttgctcatcaatgctccggaacgccgctgggttgctgggccggcttggcggtgggtggcggcaggggtttctgcggcacgctcgggccggcgctgacgatgacgaaggcgtcggcgtccaggtgcttggccatggcggtcctgacctgttcgacgctgagtccctcgacctgcttgaggaagctttccaggtagtccagcggcaggccgtagaaaccgatggcgccgagctggccgacgatgtcggcgttgctcgcggtggacagcgggaagctgccggccagttcgcgcttggcgtcgtccagttccttctgggtcgggccgttggccaggtagtcgcggacgatgtcctggaccagcttcagcgccccctcgctgagttcggcgcgggtctggaagttgatcatgaacggaccgcgtgcctgcatggcggtgaagccggaatagatgccgtaggtcaggccgcgcttttctcgcacctggtccatcaggcgggtgccgaagccgccgccgccgaggatctggttgcccaggtagagcgccgcgtagtcgggatcctggcggtcgatgccaagctgggcgagcatcaggtgggtctgctcggaggggaagtcgatgtgcgtcaggccgggtttgggcgtttccggctggacggtcttggccagcgccgggccctggggcagcgccttggagacttccgcggcgatcgcttcggcctcctgccgcgagaggtcgccgaccagcgcgatgaccacgttgccggcggcgtaggccttcttgtggaacgcctgcaattgttcgcggctgatcgttggaacggacttttcgtcgccgtcgctggagtgcgcgtagggatgctcgccatagaggcgcttgaacagctccaggccggccagcttgccggggttctgcttctggtactcgaaaccggccaggacctggttcttgatgcgtgccagagcgtcctcggggaaggtcggctggccgatcacctgttcgaacagcttcagcgcctgggtccgcttgtcggcatcggacaggctgcgcaggccggccaccgccatgtcgcggtaggagccgttgctgaacgaggcgccgaggtcctcgaagccggcggcgatggcagtggtgtccttgcccggcacgccttcgttgagcatggcgttggtcagcatcgacaggccgggggtgccggcgtcctggctgctgccggcggcgaaggtcaggcgcaggtcgaacatcggcagttcatgggcttcgacgaacagtaccttggcaccttcggcggtcttccattcctggatgtccagcttgcgatggaccggcgcctgcttggcgacgtccttcagcgactgcaactggttttcctcgaccgccgcggcatgggccgctgccggggtctgggggggacgcgcgacgaaataggccagcgcggccagcaacgcgatgacgatcaggccgagcaggccataacgcagccctgtgcgctcactcatgacgggcctccttttcctcggccttcacaggcagcacttgcgccagggtcaggcgcgacggggtgaaataggtgcgggcggctttctggatatcgtccggagtcactgccttgagggcctccaggtcctggtcgatcagcttccaggacaggccgacgctttccaactggccgatgctgctggcctgggcggcgatggagtccttctcgtagaccatcccggcgatcatctgcgcgcgcacgcgctcgatctccgcggcgctgggcgggttctgcttgaggtcatcgagctgcttccacagaccggcctcgacctgctcgagggtcttgcccttctgcacgttcggcgtggccgagaggacgaacaggctgtcgccgcggttgaacgcgtcatagtaggtggaggcgccggcgaccagctcctcgccgcgctccaggcgcgaggccaggcgggcgctgtagccgccatcgagcagcgcgccgatcaggcgcagggcgttgacttcgcgagggttctcgctgctgcccaggctgggcacgttgaagcccatgatcaggttcggcagctgggtgcgtacgtacagcttgagccggcgctcgccgggctcggccagttccagcggcttgcgcgccggcggcagctggcgccaggggatctcgccgaagtagcgcttggcgagggtcttgacctcgtcggcggtgacgtcgccgaccactaccagggtggcgttgttcggcgcgtaccaggattcgtaccagtggcgcaggtcgtcgatggtcatgcgctgcaggtcggccatccagccgatggtcggggtgtggtagccgctggccgggtaggcggcggccttgaagcgctcgaaggcgagggcgttgggattgtcgtcggtgcgcaggcggcgctcctccttgatcacctcgatctcgctcttgaactggtcggccggcaggctcaggtgggccatgcggtcggcttccatctccagcgccaccggcaggcggtcgcgggccaggacctggtaataggcggtgtagtcgtcggtggtgaaggcgttctcttccgcacccaggtcgcgcagcacccgcgaggcttcgcccgggccgagcttgcggctgcccttgaacatcatgtgttcgagggcgtgggacaggccggtgagcccgggtgtctcgtagctggagccgatcctgtaccagagctgggaaaccaccaccggggcgcggtggtcttcacgcactatgaccttcaggccgttgtcgaggctgaactcgtgggtgggctgggtttccgccgcctgggcgaaaagcgggagacaaaggctggctaggagcaggccgacgcggcggcgagctggggttttcatggtgatctggacctttcgtgccgccaccggggtctcaggtcactgcggggcaggacccttagccccgtcgggcgaggagatgctaggatacccatccgttttccgggcggccacgtcccgtgccgctcccttgagatacaagcattcatgtttggttccaacgacgacaagaaggccccgcagggcggggaaaagaaaggtctgttcggctggtggcggaaaaagccgcaagccggcgagcagcctgccgatcagcctgtcgagccggtctccgagacagcggccgccgagcagcgcgcgcctgccgatgacgtggcgcaatccctgacagaacagccaggtcggcagcagccctccgctgccgagccggccgagccggcgccggttgccgaagcaccgctcgccagtgacgagccagcgtcggccgaggagcattcgccccggcccgaggcgcccgtcgcgcaacccgagcctatcctggctgccgagcccgagcccgagcccgagcccgagcccgagcccgttgcgccgctggccgccgcgccggcagtcagcgagccggcgaccaggccgggcttcttcgcccgcctccggcagggactgtccaagaccagcgccagcatcggcgaaggcatggccagcctgttcctcggccgcaaggaaatcgacgacgacctgctcgacgacatcgagacgcgcctgctgaccgccgacgtcggcgtcgaggccaccaccctgatcgtgcagaacctgaccaagcgcgtggcgcgcaaggagctggccgacagcggcgcgctgtacaaggcgctgcaggaagagctggccagcctgctgcgcccggtggagcagccgttgcaggtcgacgtcgcgcgcgagccctatgtgatcctggtggttggggtgaacggcgtgggcaagaccaccaccatcggcaagctggcgaagaagctgcaactcgagggcaagaaggtcatgctggccgccggcgacaccttccgcgccgccgccgtggagcagttgcaggtctggggcgagcgcaaccgcatcccggtgatcgcccagcacaccggcgccgactccgcctcggtgatcttcgacgcggtgcaggccgccaaggcccgcggcatcgacgtgctgatcgccgataccgccggacgcctgcataccaaggacaacctgatggaggagctgaagaaggtgcgccgggtgatcggcaagctggacgagacggcgccccatgaggtcctgctggtgctcgacgccggcaccgggcagaacgccatcaatcaggccaagcagttcaacctcgcggtggagctgaccggcctggccctgaccaaactggacggcaccgccaagggcggggtgatcttcgccctggccaagcagttcggcctgccgatccgctatatcggtgtcggcgaggggatcgacgatctccgtaccttcgaggccgacgccttcgtccaggcactcttcgcagagcgggagaacgcatgatccgcttcgagcaggtcggcaaacgctatcccaacggccacgtaggcctgcacgaggtgtccttccgcgtgcaccgtggcgagatcctcttcgtcaccggccactccggcgccggcaagagcaccctgctgcgcctcatcctggcgatggagcgaccgaccagcggcaagctgttgctcggcggccaggacctggggcgcatcactaccgcgcagatccctttcctgcgccggcagatcggcgtggtgttccagaaccaccaactgctcaccgatcgtacggtggcggacaacatcgccctgccgctgcagatcctcggcatgcccaagccggagatcgccaagcgcgtggcctcggccctggagcgggtgaacctgaaggaaaagggcgaggcgttgccttccgacctttccaccggccagcagcagcgggtcggcattgcccgcgccatcgtccaccagccggccctgctgctggcggacgaacccaccggcaacctcgacccgcgactcgcctcggaaatcatgggcgtgttcgaggatatcaatcgcctgggcaccaccgtactgatcgccagccacgacctggccctgatcgcccgtatgcgccatcgcatgctgaccctgcagcgtggccggatcatcgctgaccgtgaggatgaggcctgatgagcgccaacgatcttccccgtggccccgaagagggcgcaccggaacgcaagacccgcgagaaaccgagccaggagcagaccgactggagcggctcgttcagcgcctacctggaaagccatcgcgccagcctggtggacagcctgcgccggttgttcggccacccgttcggcagcttcttcacctgcctggtgatgggtatcaccctgagcctgccgatgggcctctcgctgctgctgaacaatgtcgaacggctcggcggctcctggcagcgggcggcgcagatctccctgttcctcgacctgaagaccagcgaaaaccagggccaggacctgcgcgagcagatcgagcgcctgccggacgtgatcgaggcccaattgatcagccgcgagcaggcgctcagcgaattgcaggaacagtccggcctgggcgaagcgctcaaggagctgccggagaacccactgccgccggtgatctcggtcacgcccaagcagatcgaccgggccggcttggaggcactgcgccagcagctcgcggagctgcctcatgtgcagcaggcgcagctcgacctggtatgggtcgagcgcctgagcgcgatcctcaagctcggcgaacgcttcgtcttcggcctgaccatcctgctggtgctgaccctcttgctggtggtgggcaacaccatccgcctgcacatcgaaaatcgccgtaacgaaatcgaggtgatcaagctggtcggcgggacggacggttacgtgcgccggccattcctgtacatgggcgcgttgtacggcctgggcgcgggcatcctgtcctgggcgctgctggcctattcgctgaactggctgaacggttcggtggtcaacctttcagggctgtacggcagcgacttcggcctgcagggcgtgccgctggacgacggcctgtcgctcaccgtcggcgcggtgctgcttggctgggtcggcgcctggctggccgtggcccgccacctgcgcgagctggcgccgcgctgaggacaggggaatcacgaccggccggcgggtcgctgtaaaggaacttatacacccgcttgcagtcagatatccgagtgctacactgcgcgagtttcgtgaatcggaggattcgcatgaccacttctttgcaacctgtacatgccttggttccaggcgcaaacctggaagcctacgtgcactcggtgaacagcattccgctgttgtcgccggaacaggagcgtgaactggccgaacgcctcttctatcagcaagacctggaagcggcgcggcagatggtgttggcgcacctgcgcttcgttgttcatatcgccaagagttattcggggtacggcctggcccaggccgacctgatccaggaaggcaacgtcggcctgatgaaggccgtgaagcgtttcaacccggaaatgggcgttcgcctggtgtccttcgccgtgcactggatcaaggcggagatccacgagttcatcctgcgcaactggcggatcgtcaaggtcgccactaccaaggcgcagcgcaagctgttcttcaacctgcgcagccagaagaagcgcctggcctggttgaacaacgaggaagtccatcgcgtcgccgagagcctgggggtcgagccccgcgaagtgcgcgagatggaaagccgcctgaccggccaggacatggcgttcgacccagccgccgacgcggacgacgagagcgcctaccagtcgccggcgcattacctcgaagaccaccgctacgacccggcgcgccagttggaagacgccgactggagcgacagctccagcgccaacctgcacgaggcgctggaaggcctcgacgagcgcagccgcgacattctccagcagcgctggctgtccgaggagaaggccacgctgcacgacctggcggaaaagtacaacgtttccgccgagcgtatccggcagctggaaaagaacgccatgagcaagctgaaagggcggattctcgcctgatcgccgcgcctcgcgaaaaccgcaccccgcaagggtgcggtttttttctgcccggaggaatcccatgccgcgcaatacccgctggctgttctacctgtcgctggcggtcctgaccttcgtcgtcggcgcctggctggtccgtacgccggaaccggcgcggccgttgccgtggctggccgactggcaggagcaggtgctggcgccgttggcggacaacgccctgaccctgcgccagctgcacgacgcggtggatggcgagttgtgggtggacccgcgcctggatggcgtgcgcctggccttccgtggccgcctgctgggcgacggcggcccctggcaggtggaaggcgagctgggcctgagcgccgaggagcaactgagcctgcagcgggcatctgcgttgcagcctggcagcgcgccgcagccattgagcgccggattggaaggacagttgggcgacaagccgatcgtggcgctgagcatgattcccgaaggcagggtcggtgccgagcggctgctggccagtctcggccagccgcgcctgcgcctgcaactggcccagggcgaggcctgggtctatccgcaactgggcctgaccgcgcacctgccggacgacgacttgcgactgatgctcgcggtgccgcgccaggccctggaaaaaccgccgcgttgagctttcagcgctccaggcgcagcaggtagtcgtcgccgcccaactgccacatctgctggcgaatccaggccgcgcgctggcgtacgtaggggcccggcctggccgcgctccatttcagcgggctgggcagcaccgcggcgagctggctggcctgggtgcggctcaggcgctcggcgtcgaggccgaagtgatagcgtgccgcagcctgcgcgccgaagacgcccgggccccattcggcgctgttcaggtagacctcgagaatccgttgcttggtccagagcgtctcgatcagcagggtgaaccaggcctccaggcccttgcgcagccaactgcgcccggaccagaggaagacgttcttcgccacctgctggctgagcgtactggcgccgcggatactgccgccgcgctcgttgtgcgcgagggcctgctggatggccggcaggtcgaagccgtggtgctcggcgaagtgctggtcctcgccggcgatcaccgcgaccttcaggctgtccggcaactgttcccaggagcgccagtcgcgctgcaggtcgatgggctggccgtcgacccaggagccgaccttgcgttcgaccatgaccatggtccccggtggcggcacccagcgcaggaccgcgaccagcacgacgctggcggccatgaaccagagcaggtacttgaacaggcggcggaacagggatcgcaacatgcgcggcttggcttggaagaagggggcggccattatagcgggctggatgctatcaccggagtcttgtccatgcttcgtcccttcctgttgttggcggcatttttcggtttcaccggcgtggccctcggggcgttcgccgcccacggcctgaagaagcagctgagcgccgagtacctggcggtattccagaccggcgtgcactaccagttgatccatgccctggcgctgttcggcgtggcgctgctcgccacccgcctggacggccgcctggtgagcgcggcgggtggcctgttcacgctgggcatcctgctgttctccggcagcctctacctgctgaccctaagtggcatcggcaagctcggcatcgtcaccccgttcggcggcgtctccttcctcgccggctggctgtgcctggggctggccgcctggcgcctgggcaacgcctgagaccggttgcctcaggcggcgcacttgtcgacaaggcgccttggtcatcggggtggatcgggctagaatgccgctccctttcactttcgtgaccgtccagccatgcagattcaactgaacggcgagcccttcgagctgcccgacgcgcagagcgtcgcggacctgctggcccgcctggagcttggcggccgccgcgtggccgtcgagctgaacctggatatcgtgccgcgcagccagcacgccagcaccgcgctcaaggatggcgaccgcgtggagatcgtccacgccatcggcggcggctaggcctggcccccgaacccttccatcggccccgcaagcctttccatccaggagtcatccgatgagccaagcatccagtaccgatacccccttcgtcatcgccggccgtacctatggctcgcgcctgctggtggggaccggcaagtacaaggacctcgacgagacccgccgggccatcgaggcctccggagcggagatcgtcacggtggcggtgcggcgcaccaacatcgggcagaatcccggcgagccgaacctgctggatgtgatcccgccggatcgctacaccatcctgccgaacaccgccggctgctatgacgcggtcgaggccgtgcgcacctgccgcctggcccgcgagctgctggacgggcacaacctggtcaagctggaagtcctcgccgaccagaagaccctgttccccaacgtcgtcgagaccctcaaggccgccgagcaactggtgaaggacggcttcgacgtgatggtgtacaccagcgacgacccgatcatcgcccgccagctggccgagatcggctgcatcgcggtgatgccgctggccggcctgatcggctccggcctgggcatctgcaacccctacaacctgcgcatcatccttgaggaagccaaggtcccggtgctggtcgacgccggcgtgggcaccgcttccgatgcagcgatcgccatggagctgggttgcgaggcggtgctgatgaacaccgccatcgcccatgccaaggacccggtgatgatggccgaggccatgaagcacgctatcgtcgccggtcgtctcgcctacctggccggacgcatgccgcgcaagctgtatgccagcgcctcgtcgccgctggacggcctgatcgactgataccgactacctggggcgggctgtccgccggatgcgggaagcgtccggcaggcagcccgcccttctgtctctagcaaggttttcttttccatgagcgataccccgcaatccccggcccaggactccctggcggaacacgacgaagcacggccgatgcgcaccgtgaagagcttcgtgatgcgcgccgggcgtatgaccgaaggccagcagcgtggcctcgacctgggctggccgaagttcggcctggaactgagcgatgaggtccaggacttcgacgcgatcttcggtcgccaggcgccgcggactttcgagatcggtttcggcatgggccattccaccctggaaatggccgccgctgcgcctgacatcgacttcatcggcgtcgaggtgcacaagccgggcgtcggcgcgctgctcaacggcctgctgacccagggcctgggcaacgtgcgggtgtatagctgcgacgcgctggaagtgctgcgccactgcgtggccgacgccagcctcgatcggctgctgctgttcttccccgatccctggcacaagaagcgccaccacaagcggcggatcgtccagccggaattcgccgaactggtgcggcgcaagctgaaggtcggcggcgtgctgcacatggccaccgactgggagccctatgccgagcacatgctggacgtcatgagcgcggcgccgggctaccgcaaccaggccgaagacggccgcttcgtgccgcgcccgcaagagcgtccggtgaccaagttcgagcggcgcggggagcgcctgggacatggcgtctgggacctcaagttcgagcgcgtcgactgatccaccgcaccagcgacgtacccctggcgccgaaccggcgccgggactccaagcagaccgggaacacccggcggacctcaccttcaagctgcacgtttcccggcttcggccggatccaataataagagcggcacggctcggccggctgcaaaggagactgctgtgttgaagaaactgggcatcctgttgctcggggccggttgcgcctgggcggcgcaggccaaggtagacgaagtccaggccgcacgcctggaccaggacctgaccccgctgggggcggagcgggccggcaacgccgatggcagcatcccgccctggaccggcggcatcacccaggcgccggccggctaccggcccggcatgcatcacctcgacccgttcgccgccgatcgtccgcgcctggtcctcgacagccgcaacatggccgcctaccaggcgctgctgacgccgggcacccaggccttgctgcaggccaacccggactaccacctgcgggtcttccccacccgccgcagcgcatccctgccgcagcgcctgtacgacgctacccgcgccaacgccagccgcgccgagctgatcgccgacggcaacggcgtgcagggcgctgccgccggcgtgcccttccccctgccgcagagcggccaggaagcgatctggaaccacatcatgcgctaccgcggcgagcaactgcacctgcagaccaaccaggcggcggtgctggccaacggcagctacaacctgctcaagctcgaccgctacctgtacttcgtctatggccgcgaggggatgatcccggagaacctcgacaacacattgttctactacaagtacaaggtggtcgcgccggcgcgcctggccggttcggcgctggtggtgcaggaaaccctcgaccaggtgctgtcgatccgcaaggcctggcgcttcaaccgtggcgagcggcgcgtgcgccgcttgccgaccctggcctacgacagcctgcagccggataccaacggcatggccacggcggacaccgtggatgtctacaacggtgcaccggaccactacgagtgggcgttgctcggcaagcgcgagatgctggtgccttacaacagctacgcggtgcaccagaagggcctcgcctatggcgacatactcaagagccgcttcatcaatcccgacctgctgcgctacgagctgcatcgcgtctgggtggtcgaggcgaccctgcgcaagggcttcagccatccctacgccaagcgccgcttctacctcgacgaagacagctggcagatcctcgccgccgacatctacgacaaggatggcgtgctgacccgggcccaggaagtccatccgatcaactactacgatgtgccgctggtctccagcaccctggaagcgatctacgacttcaagggcggccgctacttcgtcgatgggctggacaacaacgagccgatgtacgacttcggcgtgcaggtcgggccgcgcgacttcaccccgcaggcgctgcgccgggaggggaactgaggcggacggccctcagacgatcagctcggcgccgcgtagcgtgccgtcgtcgtccaggcgcgccggcgccgggctgatctgcaggtacttgatgctgtcccgcggaatcagcagcaggtcgccgtcgacctcgacgctgagatagggcgtgtccagttgctgacggatgctgcgggcaacctcggccgggtcgtcctgctggcgcgggaagcgcagcgacaggcgctggccgtcggtgaaatgcaggtagaggtgcttgatcggtttcatgcgggctcccggaggccatgacgctcttggggacggcgctggccgccgggagaccgggggctcagctgcgatcggcgatcatgccgatcacgaagaacactagcagcagcacgggcgccagggtgtagttgttgaagtagccgaggcccttggccagccagggggtgacgaagaccatcgccaggccgtagccgaccgcgcagatcaacacgaacagcagggtgcggaagacgaagttgaggctgccgatgcgctgctgtacccaggcgttgatcgccgggccgaacagcaccagcagggtggccatgatggccagggaaatgtccgacaggtggctgcggctccagcgcgacagggtggcgatcaggtccagcgcgtaatccatcgagggttccttgtaacgaatcggcgtgtcggtcggcggagtttacctgcctgccggcacggatgggcgtgcatccgtcgtcacggcaggaaatgttgcagcaggtcgttgaggaacagctggccgcgttcgctggggcgcaggcgctgcgggtcgtcggcgagcagcccggcgtcgcgcgcggcggcgcaggcatcggcgatcgccgccagtggctggccggtgcgctgcgggtagagcgcggcggggacgccgtcgaccaggcgcagcacgttcatcatgaactcgaatggcaggtcggccgcttccagcgggcgctcgccggcctggaaggccttttgcgggttgaggtagtccttcggcaggcgggtcttccaggtccgcacgatgcgtccgcccggcgcgctcagcttggcgtgggcgccggcgccgatgccgaggaagtcgccgaagctccagtagttcaggttgtgccgggcgcacaggccgtcgcgggcgtaggcggaggtctcgtactggcggtagccgtgctcgtcgagcagggcctggccggcttcctggatgtcccagaggatgtcgtcctcgggcagctccggcggctggctccagaacaccgtgttcggctccatggtcagttggtaccaggagaggtgcgtgggggccagggcgagggcctggcgcaggtcggccagggcgtcgtcgaggctctgcccgggcaggccgtgcatcaggtcgaggttgaagttgtcgaagccggcctggcgcgccatgtaggcggcgcgcactgcctcggcgccgtcgtggatgcgccccagggcctgcagcttgtcggcctggaagctctgcacgccgatggacaggcgattgatgccgaggcgccggtagtcggcgaacttgacctgttcgaaggtgccgggattggcttccagggtgatctcgatgccgtcggcgaagccgaccctgcgctcgacgccttccagtagccggcccagggccttggccgagaacaggctgggcgtgccgccgccgaagaagatcgaacccaggcgccggccgtggacatggcgcaggtcatgctccaggtcggcgagcagggcgtcgacataggcctcttcgggcagctccgggccagcggcgtgggagttgaagtcgcaatacgggcacttgcgcacgcaccacgggatgtgcacgtacagggccaggggcgggagctggaacggggtggcttgggtcacggcggggcggggtggaggcggtttcggggcgctatcgtggcatgagttcggccaacctccaaggcggccggacgaaacgccgtgccgacgccgcccgggggcggcgccggcggttgcggctcagagacccaggcgctgcttgagcagggccatggcgcgggcccggtggctgaggcggttcttctcctcgggcgccagctcggcgctggagcagtcgcgttccggcacccagaacagcgggtcgtagccgaagccgtgggcgccgcgggcttcgcggaggatgcggccttcccagatgccctcgcagaggatcggcagcgggtcgtcggcgtggcgcaccagcgccagcacgctgacgaactgtgcgccgcgctcggcgtccgggacatccttcatggcctccagcagcttggcgttgttcgccgcgtcgccccggccgtcggcatagcgcgccgagtagatgcccggcgcgccgccgaggaagtccaccgccagcccggagtcgtcggccagcgccggcaggccggagaggcgtgcggcgttgcgtgccttgaggatggcgttctcgacgaaggaaagaccggtttcctccggttccacctggctgaactcgccgatcgagcgcaccttcacgctggcgccgagcatggcctggagttccttgagtttgccggcattgtggctggccagcaccagctgttcgagcttgatcattcgtccgggaagatttccttgttgaaactgaaggtttgcgcaggttcgcccttggcctcgaccttgatggtgaagaccagggtctcgcgctggctgatcgggaattgcgccaggttgtagatggcgccttcctcgctgacccggcggaactccaggggaatgaccttgccggtcaggtccttggcggagccggtcacgctggcttccaccggcttgcctttctccatcggcaccacgttgatcacgccctgcgccttgctgcgtaccaggccgaccgcgctggccacgttgggttggaggaagctggagttgaacacgttgtagtggacgtccaggtcgccgaagcgctgcacctgctcggcgaggaccggcaggctcaggcagaggccgaggacgaaagcggtgaagcggcgcatggtggtttctcctgaaaggtggcatggacgttgtccatggtctgctgccggcggccttggccggcttcggcagcgctctcccgaggacgagcggaggggcgcccggccctggcccgcagcctggcgcgttcctagacggcgaggttgcgggtctgcactccgggtccggtgacccggtagattccaatctcacccaatagattaggccacagccggctggcccagccatgccggtggtcacggtctacggccaggcggtcgagcacgcgcatgcgcaactggcggcacaggcgctcgaagtcctggaaggtgcagaaatggatgttcggcgtgttgtaccaggtatacggcaggaactcggagaccggcatccggccgttgcgcgccaggtaccagcggcagcgccagtggccgaagttggggaaagtgatgatgcaggtcttgccgacccgcagcatctcttcgaggatcttgtccggatagtgcacggcctgtagcgcctgggtcatcaccaccacgtcgaagctgtcgctggcgaagttgcccaggcccttgtcgaggtcctgctcgatcacgttcaccccgttttcgatgcaacgggcgatgttgtcgggatcgatctccaggccgtagccgctgacctgcttgtggtcgcgcagccaggccaggagttcgccgtcgccgcagccgaggtcgaggacgcggctgccggcgggaatccattcctggatgatttcgagatcggcgcgcatcggatcctcacacgctgatgcggttcatgtaaccgctgaaggcttgcaggtaccgggggatcggcatgaggaaggcgtcgtggccttgcggggcgtcgatctccaggtagctgacgttctttttcgccgcgatcagggcgtcgacgatttcccgcgagcgggccggcgagaaacgccagtcggtggtgaaggacatcaggcagaagtccgcctcgacgccctccagggtgcgcaccaggtcgtcgccgtgggcggcggcggggtcgaaatagtccagcgccttggtcatcagcaggtaggtattggcgtcgaagcgggtggagaactcctcgccctggtagcgcaggtaactctcgacctggaactcgacgctgtgcaggtcgtagttgagcttctcggtcttcagtacgcggccgaacttggcgcccatggcgtcgtcggacaggtaggtgatatggccgaccatccgcgccagcttgaggccgcgcttgggaatcacgccctgttcctggaagtagccgccgaggaactcagggtcggaaagaatcgcctgccgggcgacttcgttgaaggcgatgttctgcgccgacagcttcggcgcgctggcgatgcacaggcagtgacggacgcgttcggggtagctgatggtccattgcagcgcctgcatgccgccgaggctgccgccgaccaccgcggcccactggcggatgccgaggcggtctgccaggcgcgcctggctatgcacccagtcttccaccgtgaccatcgggaagtccgcgccgtagaccttgccggtcgccggattgatgctggcggggccgctggaaccgttgcaaccgccgaggttgttgagggcgacgacgaagaacttgcgggtgtcgatcggcttgcccggaccgatgcagctgtcccaccagcccggcttgcgctcgtcgacgctgtggtagccggcggcgtggtggtggccggagagggcgtggcagatcagcaccgcgttgctctgcgtggcattcagctcgccgtaggtttcgatcaccaggtcgtactcggccagggacttgccgctggtcagctcgagcggttcgttgaagtgcagcgtctggggggagaccagaccgacggagtcgtcggggaagactgtgggcatcgaccctgctctcgaacaaaggagggcgccagtctaaagagcgtcgcccccagcggcaagcgcgctggcgcgcgccgtgggagcggggtcaggcgcgctgcgagccgggcaggttgaccaccttggcctggcgctgcaggggcgaggggcggcgcaactggcggaggatgtcgccggcttcgcgcaactgttcctgcaattccccggcgaacccggcgaaggcctggctgcgctggcgtacctgctgggtctcctgggccaggcccttgaggcggagcatgtggctttcgagcaactgtttgttttccagggtgtgctgcatcagcggcatcagcgcgtcgttggcccagcgctcggtttcctcgcgcaggcgctggtgcaggccgaccacctcctgcaccagggtggcgaagaagcgccgggtcagcaggcgttgctcggtaagcacggtcttcagctgcaggcggaactggtcgcccttcttcttcagttgcaacagttcgcgctggtagcgctggacccgtagctgcggcgcgtcgagggcgtagagcgggttctcctcgttgtgccggcggtagatggcggcgaccatgcggttggccatgccggcctcgtgctcgaggttgtcgaggtcgtgctccaccgcgcggaagaacgccaggatcgcctggttgatgccgaccgtggtcaggctgccgttgaggttgcgccgcaccttctgcaggtgctgttccatgcgttcgctgcggatcgtctcgcgcagcgtcgcgccctggtgctgcagcaggcgctggttggtcttcaggttgagcaggcggcggtggtggcggccgtggtcgtccttggtcttcgcggtcagttcgaacagcagttggccgctgtcgcgctgcttgtcgtcgagcagcgcgcgctgttcctcgaccttctccaggcgcaggcgcagcagatgctggctgttgtgcagcaggccaaggacctggccgagcacggcgttctccagcagcgcttccttctgcgcgacgatgcgctcgcagagcagcgcttccagccgatccaggcgactgcgttcgagcagcgccggttcgccgcggaccttggccagcagcgcctgcttcgccgacagcggcagcacgtcgccgcgctgcaggccgagctggcgggccgtgccgtcctggatcaggcggatggcgttctgtacgaagcgctcgccggaaaggtcgtcccagagcacgtcgatcttgttcagcacggcgaacaggctgctgtggccgtcctcgcgcagtggctggatgtacttctgccagatttccatgtccgaggcggtgacaccggcgtcggcggacagcaggaacaggatcgcctgggcgttgggcagcatcgacagggtcagctccggctcgctgccgagggcgttcaggccgggtgtgtcgaggatccgcaggccctggcgcagcagcgggtggtcgaagttgaccagggcgtggcgccaggccgggacgcgcacctggtcgggctcgtcggcggcttccagggcatccgggtggaagccgagctggatcgcctgttccaccggcagcgccttggtcttggcgacctgggcgaaggcctgggccatgccctccgggtcgccggtgtccagcggaatgttcacccagtggcgcggcacgcgcttgaactgggcgacgctggcgtcggccaggcgcgtctcgatcggcagcaggcggatgtagctgcgctcggcgcgcggatcgtggaacagctcggtggggcacatggtggtgcgcccggcgtgggacggcagcatgcgctggccgtagccggcgaagaacaggctgttgatcagctcggtcttgccacgcgagaactcgccgacgaaggccagggtgatgtggtccgcgcgtagttggcgcagggcgcgttcgagcttggcctcgaccgccgggctgttcagccggctgcgctccagccagccgcgatagcgggtgatttcccgcatcagctcgcgcttccaggcgacgtaggcgtcgatttgatggctgagtctttccatgctcatccagggactccagggcgcgggaccggcgggggaaggatggcgtggattatgcgggggagcgggggagcgtcaattggcctgcttcacattcctgcacgtaaggtcggtcaagcgggtcgagcggcgatccccagttcctccggcaatcgggtcggacggcggatgcgcacccgtttctgccggttcagctcgccgctttcgagactcaccaggctcttggccacgccgaaggccttgccgaggaaggccagcagatgggcgttggccttgccctccaccggcggtgcggtgaggcggatcttcaggcgctcgccgtgcagcccggcgaactcgtcgcggctcgccttgggctgcaggtggcaatcgaggagcaggtcctcgccatcccagcggtagaagctcagaggaaaatgctcaactgctggggcatgccggtcatggccgccaggttgttgatcaccagcatgtcgatcagcttcagcgcgaggaacgcgaagatcggcgagagatccagtccgccgaggttcggcaggagcttgcggaacggcatcagcagcggttcgcagatctggttcaccagttgcgcgccggggttgtagctgcccggggcgacccaggaaaggatcacgctgatgatcagggcgaagaagaacaccttcaggaacagcgaggtgacggcgatgatcgaccagatcagcagttgcatgatgaagccgccgacgccgtagcccatcagcatcaggatcaggatcatcagcaccagctggatcaggatcgccagcaccagcgaggccaggtcgatcccgccgaagccggggatgatccgccgcagcgggttcagcagcggcttggtggcgcgcacgatgaactggctgagggggttgtagaagtccgcgcggaccaactgcaggatgaagcgcagcagcacgatcagcaggtagaggctgccgagggtctggaggatatagatagcagcggtgttgaggccgatcatcgactactccttattggccaagctgttcggccagctcggcggagcgctggctggcggcgttcagggcctgctccaccagtgcttcgaagccgttggcctggaaggatttgatcgccgcctcggtggtgccgttgggcgaagtcacccggcgccgcagttcggccggctcgacctcgctggacagcgccatctgcgccgcgccgagggcggtctgcagggtcaggcgcgaggctgtctcgcgggacaggccgagcttctcgccggcgtcggtcatggcctgcatcagcaggaagaaatacgccgggccgctacccgacactgcggtcaccgcgtcgatctgcgcttcgtcgtccagccacagggcgatgcctaccgcagacagcaactgcccggcctgctcgcgttgcgcggcgctgacctgcgcgttggcgtacagcccgctggcgccctggcgcagcagcgccggggtgttgggcatgcagcggaccaccgggcgcggctggccgagccaggcttcgaggctggcgcaggggatgccggcggcgatggagacgatcagttgctccggcttcagcgccggcgccaaggcctggcacacggctttcatggcctgcggcttgaccgacaggaccacgacgtcggcgtcggccacggcctcggcgttggactcgaccacgtcgatggcgaactcgccggcgatcttcgcgcgttgctcggcgcccgggtcgctggcgcggatctgcgccgccggcacgccttgggcgcgcaggccgccgatcaggctggcggccatgttgccggcgccgatgaacgctatgcggggtgtgctcataggggattccttcaagaagccggcgcgccgtagtcgcgggcgccgaacagggcggtaccgatgcggacccaggtcgcaccttcgccgatggctgcctcgaggtcgtcgctcatgcccatggacagggtgtccaggccaaggttcaggtccagcagcagttcgcgcaggcgggcgaacgcggcgtgttgcgcggcgcgttcggcggtgggttcggggatggccatcaggccacgcaatcggaggttgggcagttgcttcacggcctcggccagggccggcaggtcctcgggggcgcagccggacttgctggcttcgccgctgacgttgacctgcaggcagacattcaggggcggcagcccggccgggcgttgctccgacaggcgctgcgcgatcttcaaccggtccaccgagtgcacccactggaaatgctcggcgatgggccgcgtcttgttcgactggatggggccgatgaagtgccagttcaagggtaggtcggccagttcggcctgcttgccgagggcctcctgcaggtagttttcgccgaagtcgcgaaggccggcggcgtgcgccttgcgcaccgcggcggcgggcttggtcttgctcacggcgagcaggccgaccgtggccggatcgcgccccgcagcttgcgctgcctcacggatgcgcgcggcaacctttgcaatattctctgctatcgtggacattacctgcgccctatggaagtgcggtcggcgtcggctcgacgccctcgaaaccgccggcctcgatggccatcttcctgttccagtgtcgaggttccgcgtctggcgcaggacaccacgcgtgtcctggaagcaccctggctcatccggtgttttccttgtccgagacggcggctttggcggcattctacctgcttgcttgtaattggggagtcccatggatattaccgagctgctcgccttcagtgccaaacagggcgcttcggacctgcacctctccgccggcctgccgcccatgatccgggtggatggcgatgtacgccggatcaacctgccaccgctggaacacaagcaggtgcatgcgctgatctacgacatcatgaacgacaagcagcgcaaggacttcgaggaattcctcgagaccgacttctccttcgaggtgccgggcgtcgcgcgtttccgggtcaacgccttcaaccagaaccgtggcgccggcgcggtattccggaccattccctccaaggtactgaccatggaggagcttggcatgggagaagtgttcaaacgtgtttcagacgtcccgcgcgggttggtactggtcaccgggccgaccggttcgggcaagtccaccaccctggcggcgatgctcgattacctgaacaacaccaagtaccaccacatcctcaccatcgaggacccgatcgaattcgtccacgaatcgaagaagtgcctggtcaaccagcgcgaggtgcatcgcgacaccctcggcttcagcgaagcgctgcgctcggcgctgcgggaggacccggacatcatcctggtcggcgagatgcgcgacctggaaaccatccgcctggccctgaccgcggcggagaccggccacctggtattcggcaccctgcacaccacctcggcggcgaagaccatcgaccgggtggtcgacgtgttcccggccgaggaaaaggccatggttcgctcgatgctctccgagtcgctgcaatcggtgatctcgcagaccctgatcaagaagatcggcggcggccgggtggcggcccacgagatcatgatcggcaccccggcgatccgcaacctgatccgcgaggacaaggtcgcgcagatgtattcggcgatccagaccggtggctcgctgggcatgcagacccttgacatgtgcctcaagggcctggtcgccaagggcctgatcagccgcgagaatgcccgcgagaaggcgaagatcccggaaaatttctgatcctggcgccgatccgccgcgcttcgcccgaatcccggaactgcgtctaggattcaagagcgggagagcggtaccgtaggcgcattcctacctatccttgccggcgagcgcgtccagcgcccgctcgcccgcatccggctcgccgtcgcggcgcgcccctgagtgagcgagaacatcatggaattcgaaaagctgctgcgcctgatggtggaaaagggcggctccgacctgttcatcaccgccggcgtaccgccgtcgatgaaggtcaacggccgggtgatgccggtgaccaagacgccgctgtcgccggagcagacccgcgagaccgtgctaggcgtgatgaacgagcagcagcgccgcgatttcgccgagaaccatgagtgcaacttcgccatcagcgcccgcggcatcggccgcttccgggtcagtgccttctaccagcgcaacctggtgggcatggtattgcgccggatcgagaccaacatcccgaccctggaagagctgaagctcccggaaatcctcaagaagctggcgctgaccaagcgcggcctggtgatcttcgtcggcgccaccggcaccggcaagtccacctcgctggcggcgatgatcggctaccgcaacaagaactccaccgggcacatcatctccatcgaggacccgatcgagtacatccaccagcaccagggctgcatcgtcacccagcgcgaggtggggctggacaccgactccttcgaggtggcgctgaagaacaccctgcgccaggcgccggacgtgatcatgatcggcgaggtgcgctcgcgggagaccatggaccacgccgtggccttcgccgagaccggccacctgtgcctggcgaccctgcacgcgaacaacgccaaccaggcgctggagcggatcatccacttcttcccggccgaccgtcatggccaggtgtggatggacctgtcgctgaacctcaaggccatcgtcgcccagcaactggtgccgacccccgacggcaaggggcggcgggcggtgatcgaggtgctgctgaacaccccgctggccgccgacctgatccgcaagggcgaggtgcacgagctgaagccgctgatgaagcgctccaccgagcagggcatgcagaccttcgaccaggcgctgtaccagctctacacccagggcgagatcacctacgaggacgccctggcccacgccgactcggccaacgacctgcgcctgatgatcaagctcggttcggaaagcgacgccgaccacctgtcgaacctgacccagggcctgagcctggaaatcaccgacgacgaccctgccggccggcgcttccgctgaaccgccttcagtaggccagcggctcctcggcctgggcgcaggccgaggtttccagttgcagggtgctgtgttcgatctcgtagcggtcgtgcagcagcgccttcaccgttcccagcagcgcctcggcatcgaccagggccgggtcgtacaccagatggctggtcaggctgatcttgccgctggtgatcgaccacacatgcaggtcgtgcagcccggtcacgccgggaatccccagcagcgcttcgcgcagctcggccaactggatttccttcggcaccccttcgagcaacacatgcaggctctcgcgcagcaggatccaggtgcgcggcaggacccagaaaccgatcagcaccgccaccagcgagtcgacccaggcccagccggtgaaacggatcacgatcgcggcgacgatcacccccagcgagccgagcatgtcgctccagacctccaggtaggcgcccttgacgttcaggctgttgccctgggccggcgccagcaggcgcatgctggccaggttcaccagcaggccgagcacggcgatcaccagcatgcccacggactggatctccgccggctggttgagccgctcgtaggccgcgtagaggatatagaaggccacgccgaacaggaggaaggcgttgaacgccgcggcgaggatctcgaagcggtggtagccgtaggtcaggcgatcgttggtcgggcgcctggcgatgttgatcgcggccagggcgatggccagggccacggcgtcggtgagcatgtgcgcggcatcggagatcagcgccaggctgccggtgaggatgccgccgacgacctcggcgacgaggaagcttccggtcagcagcaacgcccatttcaggcgggtcgagttggtctgggcgaagctgtgctcgtgtccggcgctcatggcggctcctgtggggcggtggcggcagcaccagcctacaggataggcaattgcaaaactgtcatgcgccgggccgctctggcgcggcgtccgccgctccgctaacctgcggctcaggcgcggccgcagccgcgcacggaacgagggggacgcatgactcaacagcacgacacccatagcaaggccatcggctacctgctgtggatcttcggtttcaccggttcgcaccgcttctattacggcaagccgatcaccgggacgatctggttcttcaccttcggcctgttcttcatcggctggatcatcgacctgttcctcatcccgtcgatggaccgcgaggccgaccggcgcttccagggcggcaacctggactacaacgtggcctggatcctgctgaccttcctcggcgtgctcggcgtgcacaggatgtacatgggcaagtggatcaccgggatcatctacctgttcaccggcggcctgttcttcctcggcgtgctctacgacttctggaccctcaacggacaggtgtccgagcgcaacgggccgcagcgcatctgaggctcgtcgccaggtgcgagaagcccgccatccggcgggctttttcatgggtggcgccacggtcggcagggaattcctccggcgggacttaaggaaccaaaggttctaacgttctacctgtaggttattggcgcccgcgcgcgccagcccctatggtctgcaagccccagaacggataggtgcaatggctcacgaggccgcgcaccgtatcgctccgtgcggaaacaccgaaaggagaaaagatgacttccgactcacgtcccgccgtgctcgacctgatcggcaacaccccgctggttcgcgtgacgcgcttcgataccggcccctgcaccctgtacctcaagctcgaatcgcagaaccccggcggctccatcaaggatcgcatcggtgtcgccatgatcgaggccgccgagcgtgacggccgcctgcggcccggtggcaccatcgtcgaggccaccgccggcaacaccggtctcggcctggccctggtcggtcgcgcgaagggctaccgggtggtgctggtggtgccggacaagatgtccaccgagaaggtcctgcacctgcgcgccatgggcgccgaggtgcacatcacccgctcggacgtcggcaagggccatccggagtactaccaggacgttgccgcgcgcctggcgcaggacattcccggcgccttcttcgccgaccagttcaacaacccggccaacccgctggcccacgagtgcggcaccggcccggagctctgggcgcagaccggccacgatctcgacgccatcgtcgtcggcgtcggctcctccggtaccctgaccggccttacccggttcttccagaaggtccagccggagctggagatggtgctcgccgatcccgagggctcgatcatggccgagtactcccgctccggcaccctgggtacgccgggttcctgggcggtggagggcatcggcgaggacttcgtaccggccatcgccgacctctccagcgtgcgccatgcctattccatcagcgacgaggaaagcttcgccatggcccgcgaactgttgcgcgtcgagggcattcccggcggctcctccaccggcaccctgctggccgcggcgctgcgcttctgtcgcgagcagaaggagccgaagcgggtggtcagcttcgtctgcgacaccggcacccgctacctgtcgaagatctacaacgaccagtggatgaccgaccagggcctgctgcaacgcaagcactacggcgacctgcgcgacatcatcgcgcggcgcttcgaggagggccgggtgatcagcgtcggtccggacgacaccctgctcaccgccttccagcgcatgcgcctggccgacgtttcgcaattgccggtgctggacgatggaaaactggtcggtgtgatcgacgagtcggatatcctgctcggtgtccacgccgacgcgccacgcttccgcgatgcggtgagcagcgcgatgaacgccgcgccggagaccctcgcgcccggcgccagcctggcccagttgcaggcggtcctggaccgcggcctggtggcgatcgttgccgatgccagcggcttccacggcctgatcacccgtttcgacctgttgaaccatttgcggagaaagctcgcatgagccagcacgaccagcatcccgacgccccggcccaggcctttgcgacccgggtcatccacgccgggcaggcccccgatccctcgaccggcgcgatcatgccgccgatctacgccaactccacctatatccaggaaagccccggggtacacaaggggctcgactacggccgctcgcacaacccgacccgctgggccctggagcgctgcgtggccgacctcgagggcggcacccaggccttcgccttcgcctccggcctggcggcgatctcctcggtgctggagctgctcgacgccggttcccacatcgtttccggcaatgacctctacggcggtaccttccgcctgttcgagcgggtccgccggcgcagcgccgggcatcgcttcagcttcgtcgacccgaccgacctgcaggccttcgaggccgcgctgaccccggaaacccgcatggtctgggtggaaaccccgagcaacccgctgctgcgcctcaccgacctgcgcgccatcgcccagctctgccgcgcccgcggcatcatcagcgtggccgacaacaccttcgccagcccctacatccagcgccccctggaactgggcttcgacgtggtggtgcactccaccaccaagtacctgaacggccattccgacgtgatcggcggcatcgccatcgtcggcgacaatccggacctgcgcgagcgcctgggcttcctgcagaactcggtgggcgccatctccgggccgttcgacgccttcctcaccctgcgcggggtgaagaccctggcgctgcgcatggagcgccattgcagtaatgccctggccctggcccagtggctggagcgccagccgcaggtggcgcgggtctactaccccggcctggcttcgcacccgcagcatgagctggcgaaacggcagatgcgtggcttcggcgggatgatctccctcgacctgcgttgcgacctggccggcgcccggcgcttcctggagaacgtgcggatcttctccctggcggagagcctgggcggggtggaaagcctgatcgagcatccggcgatcatgacccacgccagcatcccggcggaaacccgcgccgacctgggcattggtgactcgctgatccgcctgtcggtgggcgtcgaggcgctggaggacctgcaggccgacctggcgcaggcgctggcgaagatctgaggctccgcagggagcggcgccgaccggcgcgtctgccggccatcgggtgttcccggcgagcatgcctcggcggataacgctccgcgttattcgccctgccgttgaggcgggttggtggcagaggttgggatagggcgcccaccccggcaacggatacgcccccggaatcgcgaacgcgaagatgaaaaagcccgccggatggcgggctttttcatggtggcagggatcagccctcgtgggtcaggtgtccgtccaccagggtgtagcgcactcgtcccggcaggcagtgaccgacgaacgggctgttctgccccttcgagtaccagctctcaccggccagggtcgaaccctgcgggtcgaacagcaccaggtcggcggcctggcccaccgccaggcgcccggcaggcaggcgcagggcctgggccgggccgtgggagaggcgggcgagcagggtcggcaggtcgagcaggccgtcctgcaccagcgtcatcgccagcggcagcagcagctcggcgccgctgatgcccggctcggtggcggcgaacggcgcgttcttggcgtccgcctcgtggggttggtggtggctggcgatggcttgtaccacgccgctcttcaccgcctcgcgcagggcttcgcggtcggccctggtgcgcagcggcggttgcacgtggtagaggctggagaagcccaccagcgcttcgtcggtgaggatcaactggtacagcgccacgtcgcaggtcaccggcaggccacgggcctgggcctgggcgacgagttcgatgccgcgggcgctggtcaactggctgaagtgcgcgcgcacgccgctctgttccaccagcagcaggttgcgggccagggccacggtctcggcggtttccgggatccccgcgaggccgaggaagctggcggtcgggccttcgtgggcgaggccgccttcggcgagatcggtgtcctgcgaggtgaagatcaccgtcaggtcgaaggtcgccgcgtactccagggcacgccgcaggatgcggttgctggcgaagccatgcaggccgttggtgaaggccacgcaaccggtgtcgcgcagggccaccagttccgacagttgctcgccgccgaagctgcgggtcagcgcgccgatggggtagaccttggcgttgccggcctcgcgggcgcggtcgaggatcagctcggccaccgccggggtgtccagcaccggccgggtgtagggcgggcagcacaggctggtggtgccgccggccgcggcggcgcgggtctcgctttcgacgttgcccttgcgtccgtagcccggctcgcgcagggcgacgctgaggtcgaccagtcccggcgcggccaccaggccggcgccgtcgagggtcttctgggcgctgaagccggccggcgcggcgccgatggcgacgatcttgccagcctcgatgtggaggtcgccgacctggtccaggccactggccgggtcgatgacgcgggcgcctcggatactgatggtcattcggcgtcctcctgttccagctggcgttgggtgttctggccgctcatggccatggacagcaccgccatgcggatggcgatgccgtaggtgacctggttgaggatcaccgactgggccccgtcggccaccgccgactcgatctccacgccacggttgatcgggccagggtgcatgacgatggcatccggcttggccagcttcaggcgcttctcggtcaggccgtagagcttgaagaactcgccctcgctgggtagcaggccaccctgcatccgctcgcgttgcaggcgcagcatgatcaccacgtcgacgtccttcaggccttcgtcggcgttggtgaacacgcgcacgccgtactgctcttccaggccgatcggcaacagggtgcgcggggcgatcacgcggatgtccgggcaacccagggtcttgagcgccagcatgttcgaacgggctactcgcgaatgcaggatatcgccgacgatcgccaccgatagctgctcgaagttccctttgtgtcggcggatggtcagcatgtcgagcatcccctgggtggggtgtgcgtggcggccgtcgccgccgttgatcaccgccacgttggggctgacgtgctcggcgatgaagtgcgccgcgcccgagtcgctgtggcgcaccacgaacatgtcggcggccatcgcctccaggttgcgcagggtgtcggtgagcgtctcgcccttgctggtggaagaggtggatacgttcaggctgatcacgtcggccgacagccgctgggcggccagctcgaaggtggtgcgggtgcgcgtggagttctcgaagaacacgttgcagacggtcttgccgcgcagcagcgggacctttttcaccgcgcgggcgccgacttccaggaaggagtcggcggtatcgaggatttcggtgagcagctcgcggggcaatccgtcgagcgagatgaagtggcgcagctggccctggtcgttgagctgcagcgggcgcttggcgtctgtcggcatggggcaggccctagtgaagaggatcaggaagcggaggaaaggaccttgcgctcgagggcgagcggtgcgggaccgaccaattttacccgttcatcgcgacccagggacagggtctggccgaccacgtcggggcggataggcaactcccgggcgttcaggtcgagcaggcagaccagggtcacgctggccggacggccgtagtcgaacagttcgttgagtgcggcgcggatggtgcggccgctcatcagcacgtcgtccaccaggaccaggtgctggccgtcgatctcgaacggcagcgccgacgggcggacctgcggatgcaggccgttctgggtgaagtcgtcgcggtagaaggagacgtcgagggtgcccagcggctcttggttgcccagttccctcagcagcgcctcggcgacccagatgccgccagtgtggatgccgacgaagcgcggccgctcgatgcagcgctcggcgagatgggcgcgcaggtcgctggccatgcgcggcaggagttcggcgggattgggtaggctcatggtggctcctcgctgacatcgatgggatggccgccgggagagcccgctgtagggaggcgcccgcggtggcgaaagcataatggcaaccggcggcgtgccggctgccatgggtcaatccgggtgttcggccagccagccttccagcagcagggcggcggccaaggcgtccaccggtcgctcgcggtagccgtcgcgctggccctgggccaggcgctcgcccttggcggcataggtcgtgaggcgttcgtcgtgggtaaagaccggcaggttgaaacggccgttgaggcggcggccgaacttttccgcgcgctcgctcatctcgcttgggctgccgtccatgttcagcggcaggccgacgacgatggcgtccggctgccattccttgatcagcgcttccacccggttccagtccggcacgccgttctgcgccttcaatacgcacagctcgcgggcctggccggtcaccgcctggccgacggcgacgccgatctgccgggtgccgtagtcgaagcccagcagcaggcgcagcggcttgtcgctggccatcaggcgtgaccggcctgggcggtgagcaggctgaggttgacgcccaggcgcgcggcggcggcgctgaggcgctcctcgggcggcaggtcgaagaggatcgccgggtccgccgggcaggtcagccaggcgttgtcgctcagttcggcctccagctggccggcttcccagccggcatagccaaggctgatcaggctcttttccgggccggtgccggcggcgatggcgaacagcacgtcctgcgaggtggacatcgccagctcgcccagttccagggtcgactggtagctcaggccgctggggtggaggacgaagccacggtcggtctgcaccgggccgccgttgtagatgtcgatgtgctggcagcgcgccggcggcagggcgtccggcttgagctgttcgaggacttccgccaggttgaggccgctgggacggttgatcaccaggcccatggcgccctgctcgttgtgttcgaccaggtaggtcacggtctgggcgaaattggggtcggccatgtgcggcatggcgatcaggaaatgatgcttgaggtaggttgggctgctctgtttcatggccgctagtgtcctgcttcggacgcgagaaagccagccttgccggcgctacttgctggacagccggtcgccgcgttcgaagcgccaggtacggatgatctccagccggtcgatgtcggccaggtcgccgctgaacggcgcatagggcgcggccaggcggacgatgcgctgggcggcctggtcgaggatcggctcgccggaagactccagcacctgcacctcgtagatggtgccgtcgcggttgatcgacaccagcagccgcaggctgccgtagagcttctgccggcgggcctcgtcggggtagttgaggttgccgatgcgttcgatcttcttgcgccagtcttccttgtaccaggcgcccttgtcgcgcatggtcgaggcggcgctcaggcggtggatgcgcgggcgcttggcgtaggcctgctgctccttggccaggtcggcctcgaggctggcgatttccgccgacagctgggttgagtcgaaatgcggcgccggcttggcgacctgctcggccttctgtgcctgggtcttgctcggtgccttctgctggcgctggcgggtggtggtcaccgcggccttgggcgcctcttcgctcctggcctgcttcggcgtagccggcggcgcgactttcttcacctggttgtcctggaacggcgcgacctcggtggtcttcggcgcggccttgtgctccagggttccgctgccctgctggttcatctgcgcgaggtagtcggccttctccggcgccttgtcgctcttgaaggtggccagggtgatttccagggtcttgctgatctggctcggcgcgggcatggagaaacccaccccgaggatgagggcgacgtgcaggatggctgcgatgaacagggtgaagcccaaacggtccgccgggcggacgccggcagcggcggagggggacttgaggacggcggcgttcattgcggatcgtggtggctggcgtggggcgaagtctgccgatggggggcggaaaagtctatgacgcactccgcgccttggacacgcggtcgctcgccgtggcgcatcggccgggccgaggcgggcggaccgaggcccgcccgcgcgattcagcgggcagccaactgggcggcgatggcgtccatcagcttgtcgccgatgcgggtgtcgaaggcctggtcgatctcgcggatgcaggtcgggctggtgacgttgatttccgtcagataatcgccgatcacgtcgaggccgacgaacagcaggccgcgctcgcgcaggtgcgggccgacctcggcggcgatccagcggtcgcgctcgctcagcggctgggccacgccgcggccgccggcggcgaggttgccgcgagtctcgccctgggcggggatgcgcgccaggcagtagggcaccggttcgccgtcgatcatcaggatgcgcttgtcgccgtccttgatttccggcagatagcgctgtgccatgatctgctggctgccatgctgggtgagggtctcgaggatcaccgagaggttcgggtcgccttcgcggtgacgaaatatcgacgaaccgcccattccgtccaggggtttgagaatgatgtcacgatgctcggcggcaaactcgcgcagaatatcggatcgccggctgaccatcgtcggcggagtgcactgggtgaactgcgtggcgaagaacttctcgttgcagtcgcgcaggctctgcggccggttcaccaccagggcgccggcacgctcggcctgttccagcaggtaggtcgaatagacgaattcgttatcgaagggcgggtccttgcgcatcaggatcacgtccagttcgtgcagcggttggtcgctttccgcttccagttcgaaccagcgggaggcatcgttgaagaccttcagcgggcgcatgcgtccacgcgcgacgccggccttctggtagaggtcctgctgttccatgtagaacagcgaccagccgcgggcctgggcagccagcagcatggcgagcgagctgtccttcttgaagttgatgcgcgcgatggggtccatgacgatcccgaggcgtacgctcatgggaattcctccgaaagggggtgggttgtccggtcgcggcggggaggccgcgtggcaagcgggtttgacgctcaggttggcgccccgtttgcgcttggtcaaggaaaaagccggcctgttccgggcattatggatagagttgcgtcgagtgtgctaaaaaggcccgcgattgggtcgcagcccgtcggtgacagggcgttagcgcactgaagaaaacacagaagaatgattcaccgagtcgatatagggcgaacatggaacagcaatccgacggtttgaaagtgatggtgatcgacgattcgaaaacgattcgtcgcaccgccgaaacactgctgaaaaaggtcggttgcgacgtgatcacggcaatcgacggcttcgatgccctggcgaagatcgccgatacccatccgaacatcattttcgtcgacatcatgatgccgcgcctggatggctatcagacctgcgccctgatcaagaacaacagcgcgttcaagtccaccccggtgatcatgctgtcctccaaggacggcctgttcgacaaggccaaggggcgcatcgtcggctccgaccagtacctcaccaagccgttcagcaaggaagagctgctgggcgcgatcaaggcacacgtacccagcttcaccccggtggacgccgtttcctgatatccggccgcatggccgttgatgcttatttcgtgatggggatcccatggctcgtattttgattgttgatgactctccgaccgagatgtacaagctgaccgccatgctggaaaagcatggtcaccaggtactcaaggccgagaacggcggcgacggcgtcgccctggcccgccaggaaaagcccgacgtggtcctgatggacatcgtcatgcccggcctcaacggcttccaggcgacccgtcaattgaccaaggacgccgagaccagcgccatcccggtgatcatcgtcaccaccaaggaccaggagaccgacaaggtctggggcaagcgccagggcgctcgcgactacctgaccaagccggtggacgaagagaccctgctgaaaaccatcaatgcggtgctggcgggctgagcccgtcgcagcgcatcgctcaccctgaccccggaaagaccaggccccgcatgtcggacgttcagacccccttccagctcctcgtcgacatcgatcagcgctgccgacgcctggccgccggcctgccggcccagcaggaggcggtgcagagctggagcgggatcggcttccgcatgggcgggcggttcttcgtcgcccccatgggggaggtcggcgaagtcctgcacgaaccgcgctacacccagctgccgggcgtgaagacctgggtcaagggggtggccaacgtacgtggccgcctgctgccgatcatggacctctgcggtttcctcggcaccgaactgtcgcccttgcgcaagcagcggcgggtgctggtggtggagcacctggacgtgttcgccggcctcatcgtcgatgaggtgttcggcatgcagcacttcccggtggacaccttcagcgaacagctgccgccactagaagcggcactgcaacccttcattcatggcgtcttccatcgagagcagccgtggctggtgttcagcccgcatgcgctggcgcaacaccagggcttcctcgacgtcgccgtataaacagcttcaccggttgggccggtctgccggcccgtgtcgtgacatggaaatcgtaatcgtggtcggtccgggcgggggccaaatatgaagaaaatcaacgcaggcaatcttttcgcgggcatgcgcagcagctcggtgatcgcggggctgttcatcgtcctcatcgtctcgatcgtgttgctgttcgccaactttgcctacctcaacacccagtcgaaccatgacaagcagtacatcggccatgccggcgaactgcgcgtcctgtcgcagcggatcgcgaagaacgccaccgaagcggcggcgggcaagggcgaggcgttcaagctcctgaaggatgcgcgcaacgacttcgagaaacgctggaacatcctggtcaacggcgacgagagcacatccctgccgcccagtcccgaagcggtgaagccgcagatggacgtggtgcagcaggactgggatggcctgcgcaagaacgccgactccatcctcgccagcgaacagactgtactgtccctgcaccaggtggcctcgaccctcgccgaaaccatcccgcagctgcaggtggaatacgaagaggtggtcgacatcctgctggagaacggtgctccggccgaccaggtcgcggtcgcccagcgccagtcgctgctcgccgaacgtatcctcggctcggtgaacaaggtgctggccggcgacgagaactcggtgcaggccgccgacagcttcggccgcgacgccagcctgttcggccgcgtactgaagggcatgcaggaaggcaacgcggcgatgagcatctccaaggtgaccaacgccgaggcggtggatcgcctgaacgagatcgccgaactcttcgagttcgtctccggttcggtggacgagatcctcgagacctcgcccgacctgttccaggtccgggaagcggcgaacaacatcttcagcgtttcgcagaccctgctggacaaggcctcgcaactggccgacggcttcgagaacctggccggcgggcgtagcatcaacctgttcgccggttacgtcctcggcgccctggccctggcctcgatcatcctgatcggcctggtgatggtgcgcgagaccaaccgccggctggccgagaccgccgagaagaacgaccgcaaccaggccgcgatcctgcgtctgctcgacgagatcgccgacctcgcggacggcgacctgaccgtggccgcgaccgtgaccgaggacttcaccggcgccatcgccgactcgatcaattactccatcgaccagctccgcgaactggtggagaccatcaaccagaccgccgtgcaggtggccgcagcggcccaggaaacccagtccaccgcgatgcacctggccgaagcctccgagcaccaggcgcaggaaatcgccggcgcctcggcggcgatcaacgaaatggcggtgtcgatcgaccaggtatcggcgaacgcctcggaatcctcggcggtagcggaacgttcggtagccatcgccaacaagggcaacgaggtggtgcacaacaccatcaccggcatggacaacatccgcgagcagatccaggacacctcgaagcgaatcaagcgcctcggcgaatcgtcccaggagatcggcgacatcgtcagcctgatcaacgacatcgccgaccagaccaacatcctcgccctgaacgccgcgatccaggcgtcgatggccggggacgcgggccgcggcttcgccgtggtagcggacgaggtacagcgactggcggaacgttcctcggcggcgaccaagcagatcgaggcgctggtgaagaccatccagaccgacaccaacgaagcggtgatctcgatggagcagaccacctccgaggtggtccgcggcgcgcgcctggcccaggacgccggtgtggccctggaggagatcgagaaggtatccaagaccctcgcggcactgatccagaacatctccaacgccgcccgtcagcaggcatcgtcggccggccacatttccaacaccatgaacgtcattcaggagatcacctcgcagacctccgccggtaccaccgccaccgcgcggagcatcggcaacctggcgaagatggcgagcgagatgcgcaactcggtatccggcttcaaactgccggagggcgtggagcaggcctgagcataggcgcggcggccgcctggcgggcgccgcgtcgacaccttggacgaggggcacggcatgcaggcgaacggcgtctggtcactgcagccgctggccgatatgtcggcagcggagttccgcgactggcaggtcctgttggagaaccgcaccggcgtggtgctcaacgagcagcgccggacgttcctgcaggccagcctgaccgcgcgcatgcgtgaactgggcatcggcgactaccacagctactaccgccaggtgaccgacggtccgcgtggcgcagtggagtgggcgaccctgctggaccgcctgaccgtccaggaaacccgttttttccgtcatcccccgtctttcgagctgctcgagcgctacctgggcgagcgcctgcgccgcgaaggcatgccgcggccctgggccctgtggagcgtcggctgctccagcggcgaggaaccctactcgctggcgatgtgcgccgcgcaggcgttgcgcgggcaggaacgggaagattttttcggcgtcaccgggacggatatcagccttcacgccctgcagcgggcgcggcaggcgaactatccggcccgcaagctggagcaactggaggccggactggtcgaacgctattgcgaacgccaggccgacggcagcttcagcgtgaaaacgatactgaccgagcgcgtctgctgcgcccggctgaatgtgctggacctggcgaaggcgccctggtccggcatggacgtgattttttgtcagaacctgctgatctacttccgtcgctggcgacggcgcgagatcctcaaccggttggccgaacggctggcgccgggaggcttgctggtgatcggggtcggcgaagtggtcgactggagccatccggagctcgagccggtcgccgacgagcgggtcctggcctttacccgtaaggggtactcaggcacatgaatggagtggctatgggtgaccggcacgactacgtcgctctggaatgggtgaaaggcgagatcgccgaaaccctgaaacaggcgcgccaggcgctggaagcgttcgtcgagaacccgcaggacccgacccgcatgcggttctgcctgacctacgtgcaccaggtgcagggcaccctgcagatggtcgagttctacggcgcggccctgctcgccgaggaaatggagcagttggtccaggccttgctggacggtcgcgtgccgaaccagggcgaggccctggaagtgctgatgcaggcgatcctgcaactgccggtctacctcgaccggatccagaccgcccggcgcgacctgccgatggtggtcctgccgctgctcaacgacctgcgcgccgcgcgcggcgagaagctgctctcggaaaccagcctgttcgcgcccgacctgtcgcagcgccagccgcaactggacggcgaggccatcgcgcaactgcgcaccgacgaactcggcggcttgctgcgcaagctgcgccagacccagcagatggccctggtcggcctgctgcgcaaccaggacgtggcgaccagcctcggctacctggcgcgtgtctatgcgcgcctggagggcctgtgccgcgaggcaccgctggggccgctgtggagcatcgcttccggcctggtcgagggcctggccaacggtagcgtggtcaacagcgcctcggtgcgcaccctgctgcgccagctcgaccgcgaactcaagcgcctggtcgagcagggcgccgacggcctgaaccaggccgcgccggacgagctggtgaagaacctgctgttctacgtggccaaggcgccttcgcagtcgccgcggatccgcgctctgaaggaacagtaccgcctcgacgaggcgctgcccgaccacgagacggtggacgccgagcgcgcccgcctcgccggacccgaccgcgacgcgatgcgttcggtggtcggtgccttgtgcgaggaactggtgcggatcaaggacagcctcgacctgttcgtgcgcagcgaccgtggccacccctcggaactggacgccctcctggcgccgctcaagcagatcgccgataccctggcggtactcggcttcggccaaccgcgcaaggtcatcctcgaccagttggacgtcatccacgccctggcccagggccgccgcgagccgagcgacgcgatcctgatggacgtcgccggcgcgttgctctacgtcgaggccaccctggccggcatggccggtcccggcgacgagcgcaacagcgaggaaagccgcctgcccaccaccgatgtggcgcagatccaccagttggtgatcaaggaagcgcgcaacggtctggagcaggccaaggacgcgatcatcgagttcatcgcctcgcagtggaaccacgagcacctggcccgcgtgccggagctgctgacccaggtccgcggcggcctggcgatgatcccgctggagcgcgccgcgaccctgctggaaacctgcaaccgctatatccaggaacagctgctggcgcgcaaggcggtgccggactggcagagcctggataccctggccgatgccatcaccagcgtcgagtattacctggagcgcctgagcgaggaccatgccagccagagcgacctgatcctcgacgtcgccgaggacagcctggcgaacctcggctatacgctgaaaccgaattcgtcggccccggccgagcctggcctgtccgggcccgctgccatcgagtccccggctgccgagccggagaggccggaggcggtcgtcgaggtcgccgagacagcggagcaaccgcccgccgacacggctcctgccgaggccgcgagggaagatgccccgcagctggccagcgacgacaactggacccttggcgaagtcgcgcccgacgccggcgagccgtccctcgacctggccctggacctgccgctggacgattccgccgaagtgccgccggcgttgccggaggtggtcgaggagagcggccagccgcagtcgaccccggcgcctgcccgcagcctggacgatttcagcctcgacgagatcgatctctccggcctcgacctgcccgccgatgcggccccggcctccgggccggcggccctggcggactggtcgctgccggagcagtgggggctcggcgatgacctggcgcagccggcgcaggccggcgagacgttggatctgagcctggaggagccggcgttgtccttcgacgcgccgctggaaagcctcgagccgttgccggcgctggagcctttcgacggctccgctgaacaggagctggttctcgatgcgctcgatccgctgccgctggatgtagccttgccggaggcggagggcgaggtgtccgcctgggagggctcgagcctggaggaactggatctttccgacctcgatctccccgaggtgcaattgcccgaggctgaggccgaggcgccgcctgccgccgaggcgctcgccagcgaagcgccggccctgtctctggccgaggtgatggctgcgccggtgcagccgatcaacccgccggcgcagaacgttccggtcagcctgctgccaccgccagccgacgaggaaccggtggacgaggaactgcgcgaggtcttcatcgaggaggccggcgaggtcctggagaccatcggccgctacctgccggcctggaaagccgaccacgacgaccgcgaagcgctgaccgaggtacgccgtgccttccataccctcaagggtagcgggcggatggtccgtgccctggtgatcggcgaactggcctggtcgatagagaacctgttcaaccgcgtgctcgatcgcagcatcgccgccagcgagccggtgcagcgagtggtggaccaggtcgtggccctgttgccggagctggtcgaggagttcgccgccaatgcccagcgccagcgcgacgatgtcgacctgctggcggccaccgcgcatgccctggccaagggcgagccgctgccggaaccgccggcgccggacgacggcggagtaccgccggaagccggggcggagcagccgtcgagcctggacaacggcgtccaggcgccgccattggccgacgcgccgcaggccgctgccgaggcgcagagcgacgtcgaactgctcgatccgcaactgctggagatcttcaccaacgaggcggaaacccatctcgaggccctggtcggcttcctcgccgactgcgcccgcgaactgccgcagccggtcaccgatgccttgcagcgtgccctgcataccctcaagggcagcgcacacatggccggcatcctgccgatcgcggagatcgccacgccgctggaaaaactggtcaaggaatacaagtccaacctgctcgccttcgacctgcgcgaagccgagttgctgcacgacgccgagcaactgttccgcatcggcctggagcaggtcggcgcgcaacggccattgaacccgatccccggcagcgacgcgttgctggagcgtatcgaggcactgcaccaggaacgcatcgcctcgctcgaggccgagcgctacagcgatgccggcgagcgccgcgatccgttgctgatcgaggcgttcctcgtcgaaggcatggacatcctgctggacgccgaggacctgctcgagcgctggcacgagcatccgcaggagcgccaggaactgagtgcgctgcgcgaggagctcagcactctggaccggggcgcccggcatgccgagctgccacaggtggaagaactctgccaggccttgctggcgctctacgatgccgtcgaggaaggccgcctggcggtcagcccggcgttcttcgaggaagcccgccaggcccacgaggcgctgatcgggatgatggaccaggtcgccgccggcctgcaggtcacgccgcgtccggagcgggtcgcggccctgcaggagctgttggaagcgcccgccgccgaggccgttccgttcatcgacccggagagcctcggcgccgacgatttccccccggaagacgaagaaccggccctccccgaggcggtcttcgaagaggccgggacgcctgccgaggagaccgtaccggcagcgcctgcaccggctcccggccgcgagctggacgaggaaatggtgtcgatcttcctcgaagaggcggtggacatcctcgaaagcgccggccaggcactggcccaatggcaggccgagccgggcgcgctgtcttcgctcagcgccctgcagcgcgacctgcataccctcaagggcggcgcacggatggccgagatcgccgagatcggcgacctggcccacgagctggaggccctctacgaaggactggtcgaccgccgttaccagcactccccgcaactggccggattgctgcaagcctgtcacgaccgcctggccgaacagctcgaccagttgagcgccggccagcccctggccgacccgcacgaccttatccagtcgatccgccggttccgccagggcccgctggccgaggccgcgacaccgggcgaggcggaaagccctgtcgaggaactcgttgcacctgccgtcgaggagcccgccgcgcctgctgcggaggcgttcgaagagcgcgatcccgaactggtggagatcttcctcgaggaaggcttcgatatcctcgacagcgctgccgccgcgttgcagcgctggatggacgacgtcgacaacaccatcgaactggaagccttgcagcgcgacctgcataccctcaagggcggtgcgcggatggccgagatcggcgagatcggcgacctcgcccatgagcttgaattcctctacgaaggcctctgcggtggacgcctgcgcgccagcccggccttgttcggcctgctgcagcgctgccacgacgagctggccgagatgctcgaggcggtgcgtggccaccgcacgctgcccgacgggcaggcgctgatcgcggagatcaggcgcctgcgcagcgatcccgacgagcaactgagcgtacccaccagcgtcagcctcaagccgctggcggcgaagggcgcggcggccgacgagagcgagatcctcgacatcttcctcgaggaagccgacgacctgctggagaacctcgaactggcgctcggccgctgggacggcggcaacggcgacgcccagccgctggacgacctgctgcggatcctgcacaccctcaagggcggtgcgcgcctggccggacagaccgagctgggcaacctggcccacgacctcgagcagcatctcaccgatgcgcagcaacagggcgcgccgtggccggacagcctgctgctggatgcgcagtcggggctggaaggcctgcagcggcaggtcgacctgttgcgcgagcggctggccgaggacgacgaggccggtgagcggcccgagcccgcccaggcgctggtccaggccgacgataccggccgcgcggtggcctccgcgctggccgagctgacccgcctggccccggcggctggcgcgatcatggcggccgaggcggcgcctccggccgccccggccaccaccctgccgttcgtgcgcaaggcccaggaggcggcccaggaggccgcttcccgacgtgccccgcaggagctggtgaaggtgccggcggaactgctggagaacctggtcaacctggcgggcgagacctcgatcttccgcggccgggtcgagcagcaggtgagcgacgtcggcttcaccctcggcgagatggagtccaccatcgagcgggtgcgcgaccagttgcgccgcctcgacaccgagacccaggcgcagatcctctcgcgtcaccaggccgatgccgaacgcgccggctacgaagaattcgacccgctggaaatggaccgctattcgcagttgcagcagctctcgcgcgcactcttcgaatcggcctccgaccttctcgacctgaaggaaaccctggcggcgaagaaccgtgacgcggagaccctgctgctgcaacaggcgcgggtcaacaccgaactccaggaaggcctgatgcgcacccgcatggtgccgttcgatcggctggtaccgcgtttgcggcggatcgtccggcaggtggccggcgagcttggcaagcaggtcgaattcgtggtcggcaacgccgacggcgagatggatcgtaccgtcctcgaacgcatcgtcgcgccgctggagcacatgctgcgcaacgccgtggaccacggcatcgagtccggcgagacgcgccgcgcggcgggcaagccggagcacggtacgatccgcctgaacatcggccgcgagggcggcgacattctcctcaccctctccgacgacggcgccggcatccgcctcgacgcggtacggcgcaaggccatcgagcgtggcctgatgagcgccgacagcgacctcagcgatcatgaagtgctgcagttcgtgctcgagtccggtttctccaccgccgaaaaggtcacccagatctccgggcgcggcgtcggcctcgacgtggccaactccgaggtcaagcagctcggcggctcggtgagcatccagaccgagccgggccagggcacccgcttcaacgtgcggctgccgttcaccgtgtcggtgaaccgggcgctgatggtgctatccggcgaggatctctacgcggtgccgctgaacaccatcgagggcatcgtgcgggtttcgccctacgaactggaggcgctctacgaccagcgcggcgaggcggggctggatacgcccagcttcgaatacgccgggcagtcctacgaactgaagtacctcggcgagctgctgaacaacggccaggaacccaagctggtcggccagtcgctgcccttgccggtgatcctggtgcgctcctcggagcatgcggtggcggtgcaggtcgactcgctggccggttcccgcgagatcgtggtgaagagcctcggtccgcagttcgccggggtcgccgggatttccggggcgaccctgcttggcgatggccgggtggtggtgatcctcgacctgctggcgaccatccgctcccggcacgcgctgctcggccaggaaagccgtcgcgaacgcctggcgctgcgccaggaaatggcggcgagcgaaagcgagcagcagcggccgccgctggtcatggtggtggacgactcggtcaccgtgcgcaaggtcaccacccgcctgctggagcgcaacggcatgaacgtgttgaccgcgaaggacggcgtggacgccatcgcccagctccaggagcaccgtccggacatcctcctgctggacatcgagatgccgcgcatggacggtttcgaggtcgccaccctggtgcgccacgacgagcgcctgggcaacctgccgatcatcatgatcacctcgcggaccggcgagaaacaccgcgagcgcgcgctgggcatcggcgtcaaccagtacctcggcaagccttaccaggaaaccgagctgctcgaagccatccagtccctggtcggccagcatgagtgagcgcgccacgccacgggtcgcggtgatcgccgacacctcgttgcagcgccacgtgttgcaacaggcgctgctcggccatggctacgaggtggtgctcaacgccgacccggccagggtcgacgacgccgcgctggagtgcgcgcccgacctgtggctggtggacctgacccagcaggacgactcgccgctgctggacagcctgctggagcaggaccgtgcgccggtgctgttcggcgagggccacgcgccggagcggcataccgaacattacccgcgctgggagcggcggctgatcggcaagctgaagcgcttgatcggcgaccccagcgatggcgttggcgacagcctcggcgcattgctcgacgaggagcgtccgccgcgcctggagattcccggcgacctcgcggcgatgccgctgcaggccggcgaagcggcccgcgaggtgtggctgctggcggcctcgctcggcggcccggcggcggtgaaggcatttctcgacgccttgcctggcggcctgccgatcggcttcctctatgcccagcacatcgatgccagcttcgagcagaacctgccgcaggcagtcggccggcacagccagtggcatgtgaagaacgtccgcgacggcgaagcgctgcgttgcggcgaggtcatggtggtgccggtgctgcacgagctcggtttccaccacgacgggcgactgaaatgcagccagcgtccctggccggaaccctacaccccgtccatcgaccagatgatgctcaacctggcccagcagttcgggcccgactgcggggtgatcgttttcagcggcatgggtagcgacggcagcgccgctgccgcctacgtgcggcgccagggtggcgaggtatggacccagcgcgccgacagttgcgtctgttcgagcatgccggacagcttgcgcgaagccggttacagcagtttcaatgccagcccccgcgaactggccgaggcattggtcaagcatctggccgcacgctgcgcgccgacaggagtcgaaacatgaaccaggccgtgatcgagcaggatggcatgagccggaacaccccagccaacccgaccccggacagcctcaccgggctgctcctgccgctgagcgaccgcaccctgctgttgcccaacgtcgccgtggccgaactgatcgcctatcgcaacccgcaggtcgccgccggcctgccgcagtggtacctgggccaggtggcctggcgcgacctgcgcctgccgctgctgtccttcgaggcggcctccagcggcgaacagcagtcggtactcggcagcagcgcgcgggtggtggtcatcaacgccctcggcggacgaccccatgtgaagttcctcgccctgctggtgcagggcattccgcgctcggtgcggctggacgccaatctcgcgagcaccgccgcgccgctggcggcgctggaactggcggcggtggacatcggcggcgaaaccgcacggattccggacctggccgggctcgaagagaagctcgccgacgccggcctgatctgagccgtccatggccggcctgcagcacgcgcggatcggcgcctccctcgaggtcgccagcgccagcctggccgggcaccgcttcgagaagcacagccacgacgagttcgtcatcagcgccaacctctgcggattggaagatgtctggctggatggccgtaccttccaggccgacagcggcgacctgaccctctacaacccggggcagatccagggcggcggcgtccgcgacggccagccctggcgcttcgccagcctctatctgcctgccgccgaactggcgagcagcctggatctttcctccgtcgagttcgaccgcccgctgctgcgcagtccggcgctgggccgcgagttggccgccagcatcgaagccttgctggccagcgaccgtttcgcccgcgagcggggcgaggagcgcctgctggatttccttggccgcctgctggcggcgagcggcacccgcctgccgcagagggccgatcctgggcgcccggctgtcgcccgcctgcaggcgctgctcgccgagcgcctggccgaaccgccggacctggatgagatggcggagcaggtgggcctgtcgaaataccacctgctgcgggcgttcaagaaggccaccgggctcagcccgcgccagtggagcatgcaactgcgcacccgccgcgccctcggcctgttgcgccgtggcctggcggtgggcgaggtggcccacgccctgggcttcgccgaccagagccacctgacccgttacttcaccagcgcctacggcatttcgccgggccgctaccagcgcgccgtgcgcggctgaactgcgcaatccggttcaagtcggcggagccgccggccgggataatccgacgtcccaccacggagtcgtcgttccatgctcgccatcttcctcgccgccttgctgttcggtttcgccttcaatgtttcccctggcgcggtgttcagcgaaacgctgcgccgcggtttgaccggcggcttccgcccggcgttgctggtgcaactggggtcgctgatcggcgatgccgtctgggccctgctcgggctcaccgggctggcgctgctgctgggctacgaacaggtgcggattcccctgaccctggcctgtgccgcctacctggcctggctcggcgtgcaaggcttgcgcgacgcctggagtccgccgctggcggcggaggatgccggcgagcaggggcgcaacgccttcggcgccggcgcggcgatctccctgtccaatccgaagaacgtggtctactggggtgccctcggcagcgccctggcggggatcgtcgacggcacgccgaaccaggcgcagtcgctggtgttcttcgccggtttcatgctctcgtcgctgatctggtgcttttgctgcgcggcgctggtggactggctgcggcgcaacacctcgctgttctggcaccgcgtcagctacgccggttgcggcgtgctcctgctcggcctggcgggactggcgctgcgcgggctgtagacgcgcctcaggccggcgccaggcgccgccgcagcaggcgttggcgcaggctttcgaacgtgccgaggtcgacatgccgggcatggtcgccgacgacgatccggccgtcgggcagctccgcccagtgctgtagtccgccctccaggtccagttcgccgtagcggatgcgcagcgcccggccggattcgaggtgccagagctgggcgaggtcccgcgagcgatgcggttccagccacggcgccaggagcagccagcctccgtccagggcctggagcttcaggtaggggccttcggccaggccgtccagcgagtggctgcggatctcgccgctgtcgagccggccttcgcagagcgtttcacgctccagccagacgatggtcccgggcgccgccgaggtcggttgcgccggatcggcgggcagatccttgccgacggggaacggcaggggctggatgcgtgcctcgcgccattcgaagaactgcccgcgggagagcaggcagacgcgctggtccggagtggtgaagaccgccggcggattctcgatggagcgccgcgcttgcggcacgtcgaagagcaaccgcggttcgtcgttgccctgggcgaagcccggatagaggaagaacaggccgcggtcggccaggagcaggtcgtccccggccaggccgatggcaagttccggggtgcggcgttggcgcaacgactgcgccggcggcagcggcaagggcggtagttcgggcgtcaacgaggcgaggtcgcgggagcgatgcagccaggcgtaggggcttcccgaacgggtcatcctgacccaggcgtgcaggccgtccgccgaactggcccggcagagcaacgcgccctgggtttcctccgcgccatcgggcaggcgttgcagcctgggccattggcgcaggtccagcaggtcgcggctgtcctcgcccggcaggcgggcgatggccaggccgggcgccaggtgctcggcgtgttcgaggcagatgtaggccgaagccggcgccaggccggccggcgcggcggcggggagggccgcccgggcgccctcgggggcgttttcctggcgcagcgtgcgggcgttgtggccctgcgctgcgagcgcatcgaggaggcgctggctgtggggggcgccgaccacgtacaggttcaggctgtcgtcttcgtccaggcgttccaccaacgccagtccgagggattccagctcctggccgagggctggcaggaaatcctcgggaaggtcgtcgcgcaggcgctccagcagcgtctccagtgcggcggaggccaactgcgggaagcgtccggcatagtctcggcggagtacgccgagcacgtcgggcaggcggatcttccaatcgaaggtaacgggcgtgtccatgcgtgcgatccgttgcgaagtgggttgcgcaacggtattcactggctgtcgccgttgtaaagcggcgggcgggatatcaggcgaagtcgccccagagttgctgggccaccgccaacgctaccaccggcgcggtctcggtgcgcagcactcgcgggccgaggcgcgcggagtggaaaccggccgcctgagcctgctccacctcggcatcgctcaggccgccttcgggacccaccaggaaggccaggcgcgacggcggcgcatggctggccaggggggcggccacagggtgcaggaccagcctgaggtcatcgtcccgcccgcgcagccagtcctccagggccagaggcggatggatcagcggcaggctcgaacggccgcactgctcgcaggcgctgatcgccacctggcgccagtgctgcaggcgcttgtcggcgcgctcgtccttcaggcgcacttcgcaacgctcgctgacgatcggggtgatttccgccacccccagctcggtggccttctggatcgcccagtccatccgctcgccgcgcgacaggccttgccccaggtggatacgcaggggcgagtcgggctggccggcgaactgctcgcggagttcgacgcggacattcttcttgccgacctcgaccagctcgccgaggtattcccggccgctgccgtcgaacagttgcacggcgtcgcccgtggcgtgccgcagcacgcggccgatgtagtgggcctgggcctcgggcaggtcgtgctggccgagggagagaggctggtcgacgaagaagcgggacaggcgcatggcgattcgagggtagtggcgacaggcgcgcagtttactgcctgccgcggggcgctggaaccggccccctcggaacgaaggggcggcgacgttcagcccggatcgcggtggtccgggtggaagtcgctgaccgccacgctgaccgcgtcgcgggtggcgatgtcgatgccttcgctggccacctcggcgaggaagtcgatctgctccggggtaatcacgtagggcggcaggaaatacaccacgctgcccagcgggcgcagcagcgcgccgcgctccaggccatgctggaagaccttcaggccgcggcgctcctgccaggggtagggcgtcctggatgccttgtcctggaccatttcgatggccaggaccatcccggtctggcgcacctcggcgacatgcgggtggtcggccaggtgcgcggtggccctggccatgtgggtggacagcgcgcggttggcctcgatcaccttgtcttcctcgaagatgtccagggtcgccagggcggcggcgcaggccagcgggttgccggtataggtgtgcgagtggaggaaggcgcgcagggtctggtagtcgtcgtagaagccccggtagacggtctcgctggtcagcaccgcggacatcggcaggtagccaccggtgagggctttggacagacagaggaaatccggggcgatgccggcctgctcgcaggcgaacatcgtcccggtgcggccgaagcccaccgcgatctcgtcgtggatcaggtgcacgccatagcggtcgcaggcttcgcgcagcagcttgaggtagaccgggtggtacatgcgcatgccgccggcgccctggatcagcggttcgacgatgaccgcggcgatctcgtcgtgcccttcggccagggtgcgctccatgtgggcgaacatgttccgcgaatgttcttcccagcacatgccgtccggacgcaggaagcagtccgggctgggcaccttgatggtgtcgagcagcagcgacttgtaggtttcggtgaacagcgccacgtcgcccaccgacatcgccgcgatggtttcgccgtggtagctgttggtcagggtgacgaagcgcttcttgcgcggcctgccgctattgagccagaagtggtagctcatcttcagcgcgacctcgatgcccgccgagccgctgtcggcgtagaacacccggtcgagccccggcggggtgatcttcaccagtcgctccgacagctcgatcaccggctggtggctgaatccggcgaggatcacgtgctccaactggtcgacctggtccttgatgcgctggttgatgcgcgggttggcgtgaccgaacacattgacccaccaggaactgaccgcgtcgatgtagcgcttgccttcgaaatcctccagccagacgccttcgccgcggcggatcgggatcaccggcaggcgttcgtggtctttcatctgggtacagggatgccagagtacgttcaggtcgcgctgcatccagtcggcgttaaggcccatgggctgtctcctcggatcgatcggcaaagcctatgcaatgggggtgagatgaacaacccggcgggttgggacacatccgacagcagccgccgacggactcctatggtggcccaaacggctctggcgtatgctgcgcgccgttgcgtctttgcttttttcctggggagtccggtatgtcgttaaggtggctgcgcgccgcggcgtttctcatgttgggggtgttcagcgcggtggcgctgggcaaggataaacagcctacggcgatcgtcgtcggcgcgggcctggcaggcctgagcgcggcctacgaattgcagaaggacggctggcaggtcacggtgctcgaggcgcggccgcaggtgggcgggcgttccggcctggccaccagcgaatgggtcggcaaccagaaggtccagcccacgctcaatgcctacctggacaccttcaagctgaagccggtgccggcgccggacttcgtccgcacccccagctacctgatcgacggcctgtactacagcagcagcgatctcgcgctcaagcagccgaacgtcgccgccgacctcaagcgcttcgagtcgaccctggacgatctctcggcatcgatctccgacccgctcaaccctgcctcgagcaataccctgttcgccctcgaccagatgaacgccgcgcgctggctggacaagctgaacctgtcgccgaccgcgcgcctgctggtcaaccagcgtatccgttcgcgctacgacgaaccgtcgcgcctgtcgctgctctacctcgcccagcagggccgcgcctaccgtggcgtcgacgaccgcgacctgcgcgcggcgcgcctgcccggcggcagccaggtgctggcggaagccttcgtcaagcagatcaagacgatcaagaccaaatccaaggtgtcgagcatcgtccaggccaaggacggcgtcgccgtcaaggccggcagcgagacctacaaggccgactacgtggttctcgccgtgccgctgaaggcgctcggccagatccagatgaccccgtccctgagcggtacccagatgtccgcgctgaagggcaccaactatggctggcgcgaccagatcctgctgaagttcaagcgtccggtgtgggacgacaagtcgcgcctctccggcgagatcttcagcgaccagggcctgggcatgatctgggtcgagccggcgctgaaaggcggcgccaacgtcctgatcaacctgtccggcgacaacgcccgcgtgctgcaggctttcggcgaccggcagatggtcgatcaggtgctgatccgcatgaacaagttctatccgaagatgcgcggtgccttcgccggctacgaaattcgtcgctacagcgccgatccgggtaccggtggttcctacctggcctacggtccgggccaggtgacgcgtttctggcggatctgggaacagccgctgtcgcgggtcgccttcgccggcgagcacaccgatgcgctgtaccccggcaccatcgagggcgcgctgcgtagcggcaagcgcgcggccagccaggtgcgcgacctgtatgccggcaagacgccggtgatcgagggcgcgccgatggtggcgaaggccgagaaggtggccgcaccgacgaccggcggcgagaagaagaacccgttcgcctggttcacccgcctgttcgattgatccccttcgccggcgccggaagctccggcgccttgcgcttcccggttcgcagcgcaatccggggttttttcttagcctgcgaacctatcttgtgaatcgatgtttcaaagcagaattttctgctttaactcgatggatttgccgctagtcttgaggcttcgcttttcaaggaagtttttcatgcagtggcgcaatacctcatcccgttacggcgtattcagcctgttcctgcactggggcagcgcgctggtggtcttcggcctgttcggcctgggcctgtggatgcgcgaactgagctattacgacccctggtaccaccccgcgccggccctgcataaaagcatcggcatcctgctggccattgccctgctggtgcggatcgtctggcgtttcgtcagcccgccgccgccggcgccggccaaccacggtccgctcacgcgggtagcgagcaagcttggccacctcgcgctgtacgggctgctgctggcggtgatcgtcgcgggctacctgatttccaccgccgacggcgaaccgatcagcgtgttcggctggttctccgtgccggcaaccctcagcgggctgcccgaccaggcagacgtcgcgggtgaaatccatctctacctggcctgggcgctggtggtcttcgccgtcctccatgccctggccgccctcaagcatcacttcgtcgaccgcgacccgaccctaaagcgcatgctcggtcgctcgtcgaatgatcaacaaccacgttaaggagaatgtccatgctgaagaagacccttgccgcgctggcgctcggctccgcactgttcaccgccggccaggcaatggccgcggactacaagatcgacaaggaaggccagcacgccttcatcgagttccgcatcaagcacctgggctatagctggctgtacggccgcttcaacgacttcgacggcagcttcaccttcgacgagaagaacccgtcggccgacaaggtcaaggtgaccatcaacaccaacagcgtggacaccaaccatgccgagcgtgacaagcacctgcgcagcggtgatttcctcaacgtcagcaagaacccgaccgctaccttcgaatccaccgaagtgaaggccaacggcgacagcgccgacatcaccggcaacctgaccctgaacggcgtgaccaagccggtcaccatcaaggccaagctgatcggccagggcgacgacccgtggggcggctaccgtgccggcttcgaaggcagcgccaccctgaagctgaaagacttcggcatcaagatggacctcggcccggcatcccaggaagtcgagctgctgctctccgtcgaaggcattcgccagtaagcggatacctgaaacgaaaaacgccggcgatcgccggcgtttttcattgtgcttcgaaaagaatgttcttaaatatcctcaagcggttgcgcggccaggcactggtcgaggagatgcaccagggtggcctgttccaccggggtgagcggggcaaacaactcgtcatgcacgcgtgacatgatggcctccgcatgctggtggatggccagcccctcgtcggtgaggaagagctggaagctgcgctggtcgctggggttgcgctcgcggcggaccaggtttcttccctccagctcgcggatcttccgggtgatcagtgccttgtcgcggcacatctggcgtcccaggtcctgcaggttcagcccgcgttgttcgtcgataagcttcaatacatggacgtcgggcggggtcaggtcgagtcgctggcaatcgagctcgctctggatgcgcgtccgcacatgctggaagaccgccatcagcgcgggcatcaggtcgggattcacggggtagttcattggtttggccgagtaaacctaatgtaaatgtggttgatccagtcaactattttgcttattttagttgaccttatcaaccttgtttcaggttctgaatatgggccatggcgccgggtggataaccggccatcgagctaaaacgtttcaggtgttttcacgcgaggctttcggacgtttacaaacacctatgaatgtaagtattttgcctgccttcttcgagccggtgcagcgccttcacgctgcatcggccgctttcgctcatgaggacaacgctatgcaacgaacgccagccatgcgtgtactggttccggccctgctggtcgcgatttcggccctttccgggtgcggaaaaagcgaggcgccgccgccggcgcaaacgccggaggtcgggatcgtgaccctggaagcgcagacggtgaccctgaataccgagctgccgggccggaccaatgcgttccgcatcgccgaggtgcgtccccaggtgaacggcatcatcctcaagcgcctgttcaaggaaggcagcgacgtcaaggccgggcagcagctctaccagatcgaccccgccacctacgaggccgactaccagagcgcccaggccaacctggcttcgacccaggagcaggcccagcgctacaagctgctggtcgccgaccaggccgtgagcaagcagcagtacgccgacgccaatgccgcctacctgcagtccaaggcggcggtggagcaggcgcggatcaacctgcgctacaccaaggtgctgtcgccgatctccggccgcatcggccgttccgcggtgaccgaaggcgccctggtgaccaacggccaggccaacgcgatggccaccgtgcaacagctcgacccgatctacgtcgacgtcacccagccgtccaccgccctgctgcgcctgcgccgcgaactggccagcggccagttggagcgcgccggcgacaacgcggcgaaggtctccctgaagctggaggacggtagccaatacccgctggaaggtcgcctcgaattctccgaggtttccgtcgacgaaggcaccggctcggtcaccatccgcgccgtgttccccaacccgaacaacgagctgctgcccggcatgttcgttcacgcgcagttgcaggaaggcgtcaagcagaaggccatcctcgctccgcagcaaggcgtgacccgcgacctcaagggccaggctaccgcgctggtggtgaacgcgcagaacaaggtcgagctgcgggtgatcaaggccgaccgggtgatcggcgacaagtggctggttaccgaaggcctgaacgccggcgacaagatcattaccgaaggcctgcagttcgtgcagccgggtgtcgaggtgaagaccgtgccggcgaagaatgtcgcgtccgcgcagaaggccgacgccgctccggcgaaaaccgacagcaagggctgatcaaggggattcgtaatgtcgaagtttttcattgataggcccattttcgcgtgggtgatcgccttggtgatcatgctcgcgggcggcctgtcgatcctcagtctgccggtcaaccagtacccggccatcgccccgccggccatcgccgtgcaggtgagctacccgggcgcctcggccgagacggtgcaggacaccgtggtccaggtgatcgagcagcagatgaacgggatcgacaatctgcgctacatctcctcggagagtaactccgacggcagcatgaccatcaccgtgaccttcgaacagggcaccgaccccgacatcgcccaggtccaggtgcagaacaagctgcaactggccaccccgctactgccgcaggaagtgcagcgccaggggatccgggtgaccaaggcggtgaagaacttcctcatggtggtcggtgtggtttccaccgacggcagcatgaccaaggaagacctgtcgaactacatcgtttccaacatccaggacccgctctcgcggaccaagggcgtcggtgacttccaggtgttcggctcgcagtactcgatgcgcatctggctcgacccggccaagctgaacagctaccagctgacccccggcgacgtgagcagcgcgatccaggcgcagaacgtgcagatttcctccggccagctcggcggcttgccggcggtcaagggccagcagctcaacgccaccatcatcggcaagacccgcctgcagaccgcggagcaattcgagaacatcctgctcaaggtcaatcccgacggttcccaggtgcgcctgaaggacgtcgccgatgtaggcctgggcggccaggactacagcatcaacgcgcagttcaacggcagcccggcgtccggtatcgcgatcaagctggccaccggcgccaacgcgctggataccgccaaggcgatccgccagaccatcgccaacctggaaccgttcatgccgcagggcatgaaggtggtctacccgtacgacaccaccccggtggtctcggcctcgatccatgaggtagtgaagaccctcggcgaggcgatcctcctcgtgttcctggtgatgtacctgttcctgcagaacttccgcgccacgctgatcccgaccatcgccgtaccggtggtgctgctggggaccttcggcgtgctcgccgcgttcggcttctcgatcaacaccctgaccatgttcggcatggtgctggccatcggcttgctggtggacgacgccatcgtggtggtggagaacgtcgagcgggtaatggccgaggaaggcctgtcgccaagggaggcggcgcgcaagtccatgggccagatccagggcgcgctggtcggtatcgccatggtgctctcggcggtattcctgccgatggcgttcttcggcggctccaccggggtgatctaccggcagttctccatcaccatcgtgtcggccatggccctctcggtgatcgtggcgctgatcctcaccccggcgctctgcgcgaccatgctcaagccgatcgagaaaggcgaccatggcgagcacaagggcggcttcttcggctggttcaaccggatgttcctttccaccacccacggctacgagcggggcgtggcgtcgatcctcaagcatcgcgcgccgtacctgctgatctacgtggtgatcgtggccgggatgatctggatgttcacccgcattcccaccgcgttcctccccgacgaggaccagggcgtactgttcgcccaggtacagaccccgccgggctccagtgccgagcgtacccaggtggtggtggactcgatgcgcgaatacctgctggagaaggaaagctcttcggtcagctcggtgttcaccgtgaccggcttcaacttcgccggccgcggccagagttcgggcatggcgttcatcatgctcaagccctgggaagagcgtcccggtggcgagaacagcgtgttcgaactggccaagcgcgcgcagatgcacttcttcagcttcaaggacgcgatggtgttcgccttcgcgccgccgtcggtactggaactgggtaacgccaccggcttcgacctgttcctccaggaccaggcgggtgtcggccacgaagtcctgctccaggcgcgcaacaagttcctcatgctcgccgcgcagaacccggcgctgcaacgcgtgcgccccaacggcatgagcgacgaaccgcagtacaagctggagatcgacgacgagaaggccagcgccctcggcgtgtcccttgccgacatcaacagcaccgtgtccatcgcctggggttccagctacgtcaacgatttcatcgaccgtggccgggtcaagcgggtctacctgcagggcaggccggacgcgcggatgaacccggacgacctgagcaagtggtacgtgcgcaacgacaagggcgagatggtgccgttcaacgccttcgccaccggcaagtgggaatacggttcgccgaagctggagcgctacaatggcgtgccggcgatggagatcctcggcgagccggcgcccggcctgagttccggtgacgccatggcggcggtcgaggagatcgtcaagcaattgccgaaaggcgttggctactcctggaccggcctgtcctacgaggagcgcttgtccggctcgcaggcgccggcgctgtatgcgctgtcgctgctggtggtgttcctctgcctggcggccctgtacgaaagctggtcgattccgttctcggtgatgctggtggtgccgttgggcgtgatcggcgcgctgctggcgacgtccatgcgcggcctgtccaacgacgtgttcttccaggtgggcctgttgacgaccatcggcctgtcggcgaagaacgccattctcatcgtggagttcgccaaggagctgcacgagcagggcaagggcatcgtcgaggcggccatcgaagcctgccgcatgcgtctgcggccgatcgtgatgacctccctggcgttcatcctcggcgtggtcccgctggcgatctccaccggcgccggctcgggcagccagcatgcgatcggtaccggcgtgatcggcggcatggtcactgcgaccgtcctggcgatcttctgggtaccgctgttctacgtggcggtcagcacgctgttcaaggacgaggcgtccaagcagcaagcgtccgtcgaaaaggggcaatgatatgaaacggtccttcctctccctggcggtagccgctgtcgttctgtccggctgctcgctgatccccgactaccagcgccccgaggcgccggtagccgcggcctacccgcaagggcaggcctacgggcagaacaccggcgcggcggccgttccggccgccgacatcggctggcgcgagttcttccgcgacccgcagttgcagcaactgatcggcttggcgctggaaaacaaccgcgacctgcgggtcgccgcgctgaacgtcgaggccttccgggcgcagtaccgcatccagcgggccgacctgttcccgcggatcggcgtggacggtagcggcacccgccagcgtttgccgggcgacctgtcgaccaccggcagtccggcgatttccagccagtacggggtgaccctgggcactaccgcctgggaactcgatctcttcggccgcctgcgcagcctgcgcgaccaggccctggagcagtacctggcgaccgaacaggcgcagcgcagcgcgcagaccaccctggtggccagcgtggcgaccgcctacctgacgctgaaggccgaccaggcgcagttgcagctgaccaaggacaccctgggcacctaccagaagagtttcgacctgacccagcgcagctacgacgtcggcgtcgcctccgcgctcgacctgcgccaggcgcagaccgccgtggaaggcgcccgcgcgaccctggcgcagtacacccgcctggtagcccaggaccagaatgcgctggtcctgctgctgggctccgggatcccggcgaacctgccgcaaggcctgggcctggaccagaccctgctgaccgaagtgccggcgggtctgccgtcggacctgctgcaacggcgcccggacatcctcgaggccgagcaccagctcatggctgccaacgccagcatcggcgccgcgcgcgcggcgttcttcccgagcatcagcctgaccgccaacgccggcaccatgagccgccaactgtccggcctgttcgacgccggttcgggttcctggttgttccagccgtcgatcaacctgccgatcttcaccgccggcagcctgcgtgccagcctggactacgcgaagatccagaaggacatcaacgtcgcgcagtacgagaaggcgatccagacggcgttccaggaagtcgccgacggcctggccgcgcgcggtaccttcaccgagcagttgcaggcgcagcgcgatctggtcaaggccagcgacgagtactaccagctcgccgacaagcgctatcgcacgggggtggacaactacctgaccctgctcgacgcgcaacgctcgctgttcaccgcgcagcagcaactgatcaccgaccgcctcaatcagctgaccagcgaggtcaacctgtacaaggccctcggcggcggctggaaccagcagaccgtgacccagcagcagaccgcgaagaaggaagatccccaggcttgatcgccttccgtgccatgcaagaacgccgaccctagggtcggcgtttttttatcctcgcggaagtcggcgggtccgcgtcacggacccgctcggccttagcggttgcgggtcagcagtgcggggcgctcgcccttgcgccgcggttccagctcgtcgagctgctcggcggtggggaagcgatccatgcgcaccaggtcgcgcttgttgatcaccaccggctggcggctcggctgcttgccggtgccatactcggacggctcgcgcagcggcgcgtcgctcatccgcgaggcattctcgcgaccctggccgcgcggcttgccggcgcgcggtttcttcgccttgccctggccggcaccctgaccgcgagcgccgccttgagcggcgccctggctcttgccgcgagcttggccctggccacgaccctgctggccggtgccgccctggggtttctgctggccaccgcggcgtccgcgtcccttgttttcctggccctggtaggggctgacgtagtcggcgcggttgccgaaattgtcgaagtcgtcgtcgaggaactcttccggatcgcgattaccgtcgacttccggcggccgattgggcttggccggacgcgcttcgcggctctgccgcggctgctgcgcttggccggcctcgcggttttccttgttcttgccaccgcgacggcggcgctttccagccggcttctcggtaccgtcctgggccgcagcgacattgctgtcggggttgctcgcctgggcgtctttcggcttgcgctcgcggctgctgcgccgttccttgtcgcggcgcggctgcttctgcggcgcttcgcggggctccggctgggccacctcgggcagcacggcctcggggtcgaaaccctgggcatcgccatcgggaatacgctgtctggtcatcttctcgatggccttgagcagcttctcttcgtccggcgccaccagcgagatcgcctcgccgctgcgtccggctcggccggtacggccgatgcggtggacgtagtcttcctcgacgttgggcagctcgtagttgaccacatggggcaactggtcgatatccaggccgcgggcggcgatgtcggtcgccaccaggatgcgcacgtcgttggccttgaagtcggccagcgccttggtccgcgcgttctggctcttgttgccatggatcgcggcggccggcaggccgtgcttggtcaggtactcggcgagacggttggcgccgtgcttggtacgggtgaagaccagcacctgttcccaggcgccgacggtcaccaggtgcgccagcagggcgcgcttctgcggagccggcaggcggaacacgcgttgctcgatgcgctcgaccgtggtgttcggcggcgttacctcgatgcgttccgggttgtgcaggagcttgttggcgaggtcgacgatgtctttcgagaaggttgccgagaacagcaggttctggcgcttgggcggcagcttggcgagaaccttcttcacatcgtggatgaagcccatgtcgagcatgcggtcggcttcgtcgaggacgaggatttccacgtgggacaggtcgaccttgttctgcccggccaggtcgagcaggcggccggggcaggcgacgagtacgtcgacgcccttggccagggcctggatctgcgggttcatgccaaccccgccgaagatgcaggtgctgttcagcggcaggtcgcgggcgtagaccttgaagctgtcatgcacctgggcggccagctcacgggtcggggtcagtaccagcacgcgcgcctggcgcgggccgtggcggtgttcgcggtcgggatgaccggcggggaacaggcgctccagtaccggcagggcgaaaccaccggtcttgccggtgccggtctgtgccgcaaccatcaggtcgcgaccttgcaacacggcgggaatcgcccgctgttgcacgggagtgggctggctgtagcccgcagcctccacagcgcgggcaagcgcctcggagagtccgagggaagaaaaggacatgcgggttttcctatatgggccggggcgaggccggctgctgtgaaatcaccaagttctgcgaactcctgtctaccttcgggccctgtcggccagggcggaaggtctggccgcggcgctgcgtatgcgctcggtggccggtgtcgaacgggtgccctcgcgggcatggccgcgcacctggtcgggggcgctggccggttcgctcccggccctgggtgggggggccgggggcagcgtcaacggagggctgcggtcagagcaggtcacgctggcgcaaatgctggcggatctcgttggcccgggagccaaggaggttgcgcagcaagctgtgattcagccaatcctcgatttgttccgcaatcggttcctgcggatagcgttcgatggcattggtcgcggctttctcccaccagacggggccgcaggcccggtcgaactcgttactgtattcgtggcaaccgtagagcagttcgatactgaactggcgcatcggagccggcaacggcagggttcccagcttgtacagcagacgcttggcacgcggtgggcgtggcagtcgatcggtcaccttgagggtgtcgtcgagggctgcagcgctgagaagggaggaaccgtgcttgcacaaccaggcctggatcttcgcgcggaacagctgtttccggctccagtaatggtggatcaggtcggtacaacccaccagctccagccgcttgtgggcggcgacggccaggacgaattcctcaagagtataggcaccgttggcaattggatagagttcatccattaattccaacgaacggtcgagtattttcgcctcttcccgaggcaggccgatgacgccggagttgagctggtgcatctcgtcgtcggcccagccgcgctcgaacaggtagggcgagaggtcgcggtagagcgggaagttacggtgttcgccatagcgcgcgccgatcgcgttgcacagcaggctgccgggctgtatgcggtcgaacaggcgcaggggcgaactgtggaagaaggtatcggtgtcgatcagcaatgcctggtcggcgtcttccagggcgtcgcgcagggccacgtgcttggcgcggaagtgatagccgtgcggttggcaccaggcgaccaactcctcggccgtcacttcgcggacctgcaccggcaggccggcgtagggactggggtcgtcggtatagaccctgaccgtcaggccatgcgccgccccgtcgcggaggtgggcgaaggcgctggcgatgctgaacagggcttcctggtggtaggtctgtcgcccgtagaccaggtagatcagatgcttgcgtgagttggccatgtctgtcgtggatcgcgtgagaggcatccctgccggtatacgctgccgggccgaaccgcgtgggcggtatcagcgtggcaactggagattcttccagatcgccaggctcggatcggcctggttcaaagtatagaaatgcagtcccggtgcgccgccctccagcaggcgttcgcacatctcgctgatgacctgctcgccgaaggcctggatgctgcggctgtcgtcgccgtaggcttccagttgcttgcggatccagcgcggcagttcggcgccgcaggcgtcggagaagcgcgccagcttggagtagttggtgatcggcatgatgccggggaccaccgggatgtccacgccgagcttggcgacccgctcgacgaagtagaaataggcatcggcgttgaagaagtactgggtgatggcgctgctggcgccggccttcaccttgcgcacgaagttcgccaggtcatcctcgaagctgcgcgcctgggggtggacctccggataggcggcgacctcgatgtggaagtggtcgccggtctcggtgcggatgaagtccaccagttcgttggcgtagcgcagttcgccgctggccatgcccatgcccgacggcaggtcgccgcgcagggcgacgatgcggcggatgccggcctcgcggtagcggccgagcagttcgcgcaactcggctttcgagtcgccgacacaggacaggtgcggcgcggtcggcaccttcacctcgccgtccagttgcagcacggtactcaacgtgcggtcgcgggtggatccgccggcgccgtaggtgcaggagaagaagtcgggcttgtagcccgccaggttgcgggcggtggccaacagcttttcatggccggcctcggtcttcgccgggaagaactcgaagctgaaacggcgttcgctctgactcatgatcggttccttggacgcgaccacggccgcgcctcttcttgttgattccgactagcgccgggtacttcagtagtactggcggtagtgctcgattttttcccgcaggcgtcgggccgtcgcggcgtgggcatggccgaggcgagcgaggatcagctgcgactcctggtggtagttcgcgatcttgtcctggttccaggtctgcggcggtggctgcaggttggtgatgcggtcgcacagcttgaccagggcgtactgcgccgggccctcggcaagcgcctggagatagtcgtcgagggaacgcttggggccgtcgccgacgcgcttgctcagggcctgcacgccggcacagacgaactcgccgaactgttgccgcagctcctcgggtgaggtcgccgtgtcttccagggtgtcgtgcaggaccgcgatctgcagggtttccccgagccgttcgatggcaccgtcgcgatcggcggccagcagcgcgttggcgaccatgcccaggtgcaccagataaggcagcggcgagccgctgagggtctggttgcggtgggcgcgggcggcgaacagccaggcctggttgtagcgatcggcgaggtgcgtggacatcgtgggagcgctcatgcgaacggggcaggcgcatggcgcctgccccgtggtccgcttagtagcgataggtgtccggcttgaacgggccttccacgctcacgccgatgtactcggcctgtttcggggtcagttgggtgaccacgccgccgaagcccttgaccatctccagggccacttcctcgtcgagcttcttcggcagcacttcgacgctcaggcgcttggccttctcggcggccggcaggtcggcgtacttctgctcgaacaggtggatctgcgccagcacctggttggcgaaggaaccgtccatgatccggctcggatggccggtggcgttgcccaggttgaccaggcggccctcagcgagaaggatcaggtagtcgtcgttgtgcgcgtcgaaaccgtccttgccggtgcggtggatcttgtgcacctgcggcttgacctcttcccaggcccagttcttgcgcatgaaggcggtgtcgatctcgttgtcgaagtggccgatgttgcagaccaccgcgcgcttcttcagcgccttgagcatgttggcgtcgcagacgttgacgttgccggtggtggtgacgatcaggtcgatcttgcccagcagcgcggcgtcgatgctggcctcggtgccgtcgttgatgccgttcttgtacggcgagacgacttcgaagccgtccatgcaggcctgcatggcgcagatcgggtcgacttccgcgaccttgacgatcatgccttcctggcgcagcgactgcgaggagcccttgcccacgtcgccgtagccgatcaccagggcctgcttgcccgacagcaggtggtcggtgccgcgcttgatggcgtcgttgaggctatggcggcagccgtacttgttgtcgttcttgctcttggtcaccgagtcgttgacgttgatcgccgggactttcagggtgccgttcttgagcatgtcgagcaggcggtggaccccggtggtggtctcttcggtgatgccgtggatgcgctcgagcatctgcgggtatttcttgtgcaggatctcggtcaggtcaccgccgtcgtccagcaccatgttggcgtcccacggctggccgtccttgaggatggtctgctcgatgcaccattcgtactcttcctcggtctcgcccttccaggcgaacaccgggatgccggcggcggcgatggcggcggcggcctggtcctgggtggagaagatgttgcagctcgaccagcggacttcggcgcccagcgcgaccagggtctcgatcagcacgccggtctggatggtcatgtggatgcaaccgaggatcttcgcgcctttcagcggctgctggccggcatacttgcggcgcaggcccatcagtgcgggcatttccgattcggcgatgatcagctcgcggcggccccaggcggccagggtgatgtcggcgaccttgtagtcggtgaaaccggcgggcgtcatgacagcgctcatgcgtaactctccattcgttgtctgcgaatgggcgccgttggtgcgttgacagaccggcgagaccggcctgagagcgcgctccgttcgagcctgacaggcctaggcctgctgcagcgcccctcgaacggaaggcgggagcgacccgaagggccgcctgagcgggcgattatagcggcgccacatgaaactcccaagtcacccctgatacgccgctcgtcgccgtgcgtcgcgtcctcgggctgcggcgatgcaccgcagcgcagaagcgcggggaatttgcgggtcaggatgctagagtgcgcggtcatgagaatcgctcccatctcccgctcgctgctgctgcagtggctgagcttcgccctctgtgcctgcgtgctggtcaacgcgctggcttgcggcgtcctgcacctgcaggcgctgggagtgggcagcgacaaagggcagaaggccagcgtcgggctgttctgcgtcgccggtgccagccaatggctatccctggatcccgacgacgggtccgccggcgatccggcaccggtcaatccccagttgccgatgagctgcccgatgtgcagcgccctggtgctgttcgtcgcgctcggggtgatctggtcctggcgcttgcaacggcgacgccaggcacgtttccgcccgcccgccacgcgcgagccggtgccgccccggtacgtctggccgccggccaacccgcgcgcttcccccgcctgatcctgaacgcccgccgcgccgggcatttgcatccgtcgcccgtcctgcctcgtccgcgcagcgctcgccgctgtccatccgggcgaggcgggcgtgcccaccatgccttgcttcaggatcgctcgatgaaaaagcactccacggcccgccgcgtcctcgcgctgggtctcaacctcaccctggccggcgttccggccttgctctgggccgatgaggaacccaccgaactgcccgccctcaccgtcagcgccggcgccgccggggaaaccccgccggccctcgatctcgacgacagcgccggcggcggctcgcgcctgggcctgagcctgcgcgagactcccggctcggtaagcgtggccaaccgtgccagcttcgagcggcgcggcctgcgcagcacccaggacatcgccaacagcctgcccggcgtgaacgcctcggcgccgcccggcttcggcggcttcgtcacctaccgcggcttcagctcgaaccaggtcaaccagttgttcaacggcattccggtgcaatacagcagcgccatgcgtccgctggacgactggatcgtcgaccgcgtcgagctggtcggcggtccgtcctccttcctcaacggcgccggtgccgtcggcggctcgctggactacatcagcaagctcgccgaccgctacggcgatttcatggaaggccgggtgcgctacggcagctacgacgattcggaagtcgccttcggcttcaaccaggccctgggcatcggccccgagccgaagcacttcgtgcgcctggacgtcagccgcagcggcggcaacggctacgtcgaccgcaattcgcgcgaatcgtggaacgtcgctttctccctgctcagcgacctgaccccggacctttcccacaccctggccctggagtaccaggacgagcaggaagacagcccctactggggcacgccggtgctcaatccctacgccggcgagctgaagatcgacaagagccgtcgccgcgagaactacaatgtcgccgatggccgctacgaacagcgcgtgcgctggctgcgctcgatcctcgaataccgggtcagcgacagcacgcgctggcgcaacaccttctaccactacgacgccgagcgcgattaccgcaacctcgagacctaccgctacaacgccgacaacagcggggtggtgcgctccaacgcattcctccagcgccacgaccagcagctcaacggcaaccgcttcgagctacagcacagccagccgctgttcggactggccagcgactgggcgctgggcttcgactacagcatcaacaagcagacgcgcttcccgagtaccgcctccgggccgttcggtacggtcgatccggccagtttcgagccgggccacttctacgacctgccgggcatgcgtcccggccaccggaaggaccgcagcaacgaggtgcgcaccagcgcgttgttcgccgagaaccgcctgggcctgaccgacgagctgtcgctggtcaccgggctgcgctacgaccacctcgacctcgacgtgcgcaaccatcgggtacccgacaaggacaatcccgcacacttcgaacggcgctgggacgtggtcaccgggcgcgccgggctggtctaccagttcactccgcacgccaacgtctacctgcaatacagtaccgccgccgacccgccgggcggggtgctgaccagcgccagcttcggccaggtccgcgactacgacctgtccaccggcgaccagtgggagctgggcagcaagttcgatttcctcgacggtcgcggcagcgccaccctggccgcctaccgcatcgtccgccgggacttctcggtggccgacccgaacaaccccaacctcagcgtgccggtgggccagcagacctccaggggcatcgaggccgccgcctccctgcggatcaccccgaagctgctggccgagggcaatttcgcctgggtcgacgcgcagtacgacgagttcaccgagaacgtcggcggcgtcgccgtctcgcgcaagggcaagacgccgccgaacgtgccggagcgggtcggcaacctgtggctgacctacgacttcgacccggcctggcagggcggggtggacgcgcgctacgtatcctcggtgtacgccaacaacgccaacacctggcacgtgccgtcctatacggtctacgggactttcctcagctaccggctggacgagcgcacgcggatcaccgggcgcgtgcgcaacctcaccgacgaggtctacgcgcgcttcgtgcagagcacgccgctgtactacgtcggcgacccgcgcaccttcgagctgagcgtgcagacgcgcttctgaggagtcgtcgatgaaacgctacctgtacctgtggcaccgctggctgggcatcggctgctgcctgctgatggtgctctggttcgtctccggcatggtcatgctgtatgtcggctatcccaagctgactccgctggaacgcctggcccacctgcccgagctggacggctgcgaggcctgcgtaccgctgcggacggccctcgccggcggcgatggaaagaccccgcggagcatccggctggccagcgtaggaggcctgccgacctacctgctggatgacgccgacggacgcacgcgtgcgctggcggcgcgcgacggccgaccgctggcggtggacgcggacagggtgctggcttcggcccgtgctttcagcggcgaagtaccgatgcagttgcaagggcggatcgaggaagacgcctggacccatacccgcaacctcgatccgcaccggccgctatggcgggtgcagaccgcggacgagcagggccggctgctctacctgtcctcgcagaccggcgaggtggtacgcgacgccagccgccgggagcgcgcctggaactggctcggcgcctggctgcactggctctatccgctgcgcggcggctggttcgacgggcagtgggcgaacctggtgatcggcctgtcgctgctggcgaccctggcgaccgtcctcggcatcctcgtcggcctgctccgctggcgcttccgcaagccttatcgcagcggctcgcgctcgccctatgcgggcggtttccagcgctggcaccacctcgccggcctgctcttcggcgcgctggtgctgagctggatcttcagcgggctgatgtcgatgaatccgtggaacctgttcggccgcggtacgccgctcgacctcgcggcctaccagggcggtagctgggaccgggcgctgcccgccggactggaggcggacgctgtcctgcggcgcttgcgtgccgccgggttgcgggtgcgcgagctggagtggcgggcgctcgacggcgagccctatgcgctcgggcgcagcgccagcggcaacagcctgctgctgacggcggatggcgaaatcctccgcgagctacccgcggatcgcctactggcggcggctcgcgcgctgctgccgggcgtgccgatgcaggccgaacgattggaacgctacgacttctattactacccgcgcgaagaacacagcatgatgggctacctggaacggcgcctgccggtctggcgcctgcgtttcgacgatccccggcatacctgggtgcacctggatccctacagcggcgcggtggttggcgtgctcgacgacggtcggcgcggcagccgctggctgttttccctgttgcatagctgggactggctgccgctgctgacccggcgtccgctgtgggacctgtggatgctcggtttcagcctcggcggcctggtggtctgcgccagcggctgctggatcggctggcgtcgcctgcgcggccgccgtccgaagcgtcgctgagaggggctacctggcaagactgggcgtcgccgcacgcccggatttgctggtagccttggttgaattcgcagtaatggatcgcacatgggcacacacaagatcgagatccgccgccgcaacgtcgagaagattctcctggccgccgaaaaagtcttcgccgaaaaaggctacgccggcacctccatgggcaacatcgccgaagaagccgaactgccgcgctccaacctgcactactacttcagcaccaaggacgagctgtaccgcgacgtcctcctcggcctgctcgaggtctggaagcaggacgccctctgcttcgagatgttcgatgacccaagggtggtattgaccagctatatccgcgcgaagatgaaccactcgcgtacccgcccgcatggctccaaggtctgggccaacgaaatcatgcatggcgcgccgctgctcggcgccaccctcgacgacagcctctacgaatgggccaagatgaaggaggcgaagatccgccagtgggtcgaggaaaagcgcatcctgtcgatcgaaccgagcagcctgctctacatgatctgggcctccacccagcactacgccgacttcggctaccaggtcgaggtgctcaacggccaccagccgctcagcgacatgcagttcgaaagggcggtacagacggtgaccagcgtggtcctgcgcggaatcggattggagccctgagcagcggagccttcgctagaaggctccggcgaaggctcagctggcgcgggtgaagtccaccgcttccgcctgttcgaggaacaccgtggtctgcgccgggaccgtctcggcgagcagccgtccgccgcggatcgagtagcgcaccgggacctgccggcgcaccgcgtcgaagccgtcgcgggccggcagcaccagcaggttggccggatggccgacctcgatgccgtattcccgcaggccgagggtgcgggcgctgttgcgggtgatcaggtcgaggccgccgtcgatctcgtcgtagcccatcatctgcgtcacgtgcaggcccatgtgcagcacctgcagcatgttcgcggtgcccagcgggtaccaggggtcgaacacgtcgtcgtggccgaagcaggtgttgatcccggcaccgagcagttccttgacccgggtgatgccgcggcgcttcgggtagtcgtcgaagcgaccctgcaggtggatgttcaccagcgggttggcgacgaagttgattcccgacagtttcagcaggcggaacagccgcgaggtgtaggcgccgttgtaggagtgcatcgccgtggtgtggctggcggtgacccgtgcgccgaggccgtcgcgatgggcgagcatggccagggtctcgaggaagcgcgactgctcgtcgtcgatctcgtcgcaatgcacgtccaccggcaggtcgtagcgcttggccaggtcgatggccttgtgcagcgactcgacgcccagctcgcgggtgaattcgaaatgcgggatcgcccccaccacgtcggctcccaggcgcagcgactcctccagcagttccaggccgttggggtaggagagaatgccctcctgggggaaggcgacgatctgcaggtcgacccagggcgccacttcgccgcgcacctcgagcatggccttgagcgcggtgagggtcgggtcggagacgtcgacgtggctgcgcacgtgctgcacgccgttggcgatctgccatttcagggtctgccaggcgcgctgcttgacgtcctcgtggctgagcagggccttgcgctgggcccagcgctcgatgccttcgaacagcgtgccggagcggttccactccggctggccggcggtctgggtggtgtcgagatggatgtgcggctcgatgaacggcggcacggcaagaccgccggcgccgtccaggcgctcgccggcgtcgtcggcggcctgttccatcggcaccagggcggcgatacggccatcggcgacgcgcagttgccagagaccttcgcggccgcgcaggcgcaggttgtcaatcagcatggaggacctcttctggtttgttcgggctgcggctcagcaggggattgagcagcaggtaggcgatggcggcgccgagcaccgcgttgaccggcactatccccggcagccagtggccggcggcggtgccgcaggcgacggcgaggatcgccgcccagttgatcgcctggatgtccgcgcaggggtgctggcggtagcgccggcggcgactcaggtagtcggcgatgatcaccccgccgatgggcgggatggcggcggagaggaaggtcagccagccgacgaagtggttgtacagccagagcgcggcgagggtgccgagggcgccgttgagcatcgccaggaagcggctggagaggccggtgatgttggcgaagccgaggccggaggcatacagcgcgttgtcgttggtggtccagatgttcaggccgaggaccaggatcgccgggatcagcaggccctgggcgatcatcacgtcggagatgtccgacttgcccaccgccgccgcgccggccgcgccgaagatgaacatcagcgagttgccgaggaagaacgccaccaggcacaccaccacggcggtacgcgcgctgcggccgaagcggacgaagtcggcggtgagggtgccggcgctgacgaacgagccgaccaccagggcgatcgcggtcgagaggctcagcggcgcgctcggcgtcacctgctgcagcgccgccaggccgccggcgtcgcgcaccgcgagccataccgagtagctgccgagaacgacgatcgccgggaccgcgatggccgacagcagggtcagaccggcgatgccgaagaacaccgtgagggtcatcagcgctccggaaaccaggatcagcaggttgacgtcgaggccggtggccttggccaccgggatggcgaacatcgctacgccgacgccgaaccagccgacctgggtgccgccgagcaacgccgagggcagccaggagcccttgctgccgaacgagtaatgcgccagcaggtgggtggaaaggccggtgcgcgcgccgatgaagccgaggatcgcggtgtacaggccgagcatcaggttgcccagcagcacggcgaggaagaagtcgtcgtagctcaggccggtgccgagggtgccgccggtccacatgctggcggaaaagaaggtcaggccgagcatcaccacgctcagggccagcgcgctcttgcgcgctgccagcgggaccggttgctggctgtagttgctgtctgcggacatgcgcgagtctccgtggggcgccggccgtccgggagcgtcggccgggccgcggcgaatggtagtcgaaggcgggtcgatccgacagacgccgttgcgcgtcgtcggaccgcagcggcacgcaggaagcgtgccggcgcgcggcagggcggcgtccgccggggatgtgggcgccgccctgcgttcaggaggcttcgcggtaggggttgcgcggatcctgggtccagttgagatagggcttgccggtgtcctgcggcaccatttcgatgcagttctccaccggacaggtgatctggcacaggttgcagcccacgcactcggcgtcgatcacttcgtagcggtgcgtaccgtcggcccggggcaggctggcgatggcctggtgcgaggtgtcctcgcaggcgatatggcagcggccgcaaccgatgcaggcgtcctggtcgatgcgggcgatcacctggtagttgatgtccaggtacttccagtcggtggtattgcccaccgcgccgccgctgaaatcggacagccgctggtagccatggctgtccatccagcgcgcgagaccgtcctgcatgtcctcgacgatacggaagccgtgcagcatcgccgccgtgcatacctgcaccgcgccgcagccgagcgcgacgaattccgctgcgtcgcgccaactgccgataccgccgatgccacagatcggcaggccgcgggtctgcgggtcgcgggcgatctcggcgaccatgttcagggcgattggcttcaccgccgagccgcagtagccgccgtgggtgctctgggtgccgaccacgggcagggcgaccatgcgctccaggtcgacgctggtgatcgagttgatggtgttgatcagcgacaccgcgtcggcgccgccgcgatgggcggcgcgcgccgactggcggatgtcggtgatgttgggggtgagcttgacgatcaccggcagcgagcagtgggtcttgcaccagcgggtgaccatctccacgtactccggtacctggcccaccgccgcgcccatgccgcgctcgggcatgccgtgggggcaaccgaagttcagctcgataccgtcggcgccggtggcttccaccagcggcaggatgtatttccacgactcctcgacgcagggcaccatcagcgacacgatcagcgcgcggtctggccagtccttcttcacctgggcgatctcgcgcaggttgatctccagcgagcggtcggtgatcagctcgatgttgttgatcccatgcacctggcggttcggtccgaagtgcgcggaataacgcgacgacacgttgaccgccgcggggtcttcgccgagggtcttccagaccaccccgccccagcccgcctggtaggcgcggaccacgttgtaggccttgtcggtgggcggcgcggaggccagccagaaggggttgggcgacttgatgccggcgaattcgatagacaggtcggccatcacgcagcctccacgttgagcatgagttgggcgtggatcgcttccgccgccagtttgccgtgctgcaccgcctgcacggtgaggtcctcgccgagcgccacgcagtcgccgccggcgtagatgccggggatgctggtgcgcatctgtccgtcgacctggatgcgctcgccgtcgcgccgcagttgcgctgccagcggatcgcccaggctggcgccttcgaaggcctggccgatggccttgaagatggcgtcggcggccagttcgaagtgctcgccggtgtcgcccaggcgaccgttctccaggcgcgtgcgggcgaagcgcatgccgcgcacccggccgtgctcgtcaagcagtacccgttccggtcgggcccaggtcagcaggcgcacctggctggccttggcgatctcctgctcatggccggtggcgcccatttcctcgaagccacggcggtagaccaggttgacgtcgcgggcgccgagccggctcatctgcaccgccatgtcgatggcggtgttgccggcgccgatgacgatgcaacggtcggcgacgggcaggtcgagcaggtcgtcgctctgccgcagctcgcggatgtagtcggtggcggcgagcaggccgggggcgtcctcgtcttccaggccgaggcgcttgctggcggccaggccgatgccgaggaacaccgcgtcgtactcgtcgtgcagggcgccgagcgccaggttgtcgccgagacgctggccgtggcgcagttcgataccgccgatctgcaggaggaattccacttcgcgccgggcgaagtcgtccaccagcttgtagcgggcgatgccgtactcgttgaggccgccggccttggcgcgggcctcgaagagcaccacgtcgtggccgtgcatggccaggcggtgggcgcaggacagcccggccggcccggcgccgaccacggcgatgcgcttgccggtggccggcgagcgcttgaacggatgttcgtcgaagccggcgtggtcgagggcgtagcgttgcaactggccgatcagcaccggtgcgcattcctgggcgttgttgcgtacgcaggcccgctggcagaggatttccgtggggcagacgcgggcgcagctgccgcctaggatgttcgccgagaggatcttctgcgccgcgccctggacattctcctgggcgatgctgcggatgaacccggggatgtcgatctcggtcgggcaggcgttgacgcagggcgcgtcgtagcagtacaggcagcgggcgctttccagggcggcctggcgggcgttgagcggcggcgcgaggtcggcgaagcgctcggcgagcgtgtccgcgccggtgtccggacgggggaggtggttcagggaatcgatcacggttgtagcctctcttctggtttcttctcggggcagtcaacggcaatacggcaccgtccggcctctacgggccggtccggtattgcgggaaggatcagcgctcgacggcgaccgggcgctggcgttcggcgcggcggccgagcacttcgtacaccgacgggtaggccgggcgctccacgtagcgtccggcgccgggttcggcgcgcaggtcgcctgcggcccagagcagcttgccctggctgatggtgtggctgggaatgccgcgcacggtgcgaccttcgaagatgttgaaatcgacccgctggtgatgggtggcggccgagagggtgcggctgccctgcgggtcccagagcaccaggtcggcatccgcgccgacgcggatcgcgcccttgcgcgggaacaggttgaagatcttcgcggtgttggtggaggtcagcgcgacgaactcgtgcatcgacaggcgcccgctgttgaccccggcgtcccacagcagcgccatgcggtcctcgatgccggccgtgccattgggaatcttgctgaagtcgtcgcggcccatggccttctgctcggcgcagaagcagcagtggtcggtggcggtggtatgcaggttgccggactgcaggccgcgccacagcgcttcctggtgttcgacgggacggaacggcgggctcatcacgtagccggccgcggtggcccagtccgggtggcggtagacgctgtcgtcgagcagcaggtgcccggccagcacctcgccgtagaccggctggcccttggcgcgggcataggcgatctcgtccagcgcctcgcggctggaaatatgcaccaggtacagcggcgtacccagcgtctcggcgatgcggatggcgcggctggcggcctcgccctcgacttgcggcggacgcgacagcggatgcgcctcggggccggtgaggccctgggcgaggagtttctgctgcaggtggaagaccagttcgccgttctccgcgtgcaccgtcggcaccgcgcccagctccaggcagcgctcgaagctggccaccagggtatcgtcggcggccatgatggcgttcttgtaggccatgaagtgcttgaagctgttcaccccgtgctgtgccaccagctcgcccatttcccgggcgacctcgtcgctccaccaggtgatggcgacgtggaagccgtagtccgcagcggatttctgcgcccagccgcgccaggtgtggaaggcctccagcagcgactgtcgcgggttggggatgacgaagtcgatgatcgaggtggtccctccggccagcccggccgcggtgccgctgaagaagtcctcgctggccaccgtgcccatgaagggcaactgcatgtgggtatgggggtcgatgccgcccggcatcaggtactggccaccgccgtcgaggacgtcgcagccggagggggtttcgaggttctcgccgatggcctggatgaggccgttggcacagagcacgtcggctcgataactctcttcgtgagtaaccacggtggcgccacggatcaacagggacatgccgtctttcctcgcaggctgaccggtcgttgccggttcttgaaattgttttttcgccatgcgccgaggacttttgtaatcctgtcagcgctgacaggattcgaatctagatgctgatcatcgattgagcaagattattttcaaatggttgtttgagtttgtaacttgttgattttaaataattaaaaataaatatcaccaaaatggtgagggttctcaccattttgacgcacttgacaagaattcaaaaaggtcgagatttcccatgcaaaatcagccgcttgaaagccgtgttcgaacggttgtggggagatgaaaaaagttcgcctgcactcctttggttcctgaccggggcgacaggctcgcgcatttcccccggtgacacgccggactgcccgtcggcgtgtcaccgacgttgtcgatgaagtgtttcagatcagtcggttacctccagtagaccggcctgcccagtgacgtcgcggggttttcggcacgcttattgagtgccgcccgccacggcattgtccggaccggaggtgcagtactggtggtgcggtactccggccatcgcattagcccgatgagcgaataactaaaagaattctggagaggcccatgcaacagagcagatcggaagtgaccgagcgcgacggcttggtcgagctgtccgccggcagcgacgtactcgacagcccccgctacaaccacgacatcgccccgacccgggtggaacagcgtacctggaacaggtggcacatcaccgcgctgtggatcggcatgtccatctgcgtgcccacctacaccctcggcggcgtcctcaccgcctacttcggcctcagcgtcggcgaagcgctgctggcgatcctgctggccaacctggtggtgctgatcccgctgaccctcaatgccttcgccggcacccgctacggcattcccttcccggtgctgctgcgcgcttcgttcggcatcatcggctccaacgtgccatgcctgatccgcgccgtggtcgcgtgcggctggttcggcatccagacgctgttcggcgggctggcgatccatctcttcctcggttcgatctttcccgcctggaaagccctcggcggtaccggcgaggtgatcggtttcctcctgttctgggggctgaacctgtgggtggtgctgcgcggcgcggagtcgatcaaatggctggagacactctcggcaccgctgctggtgctggtcggcctcggcctgctggtgtgggcgctgccgcacatatcggtcagcgaactgctggcgcagccgccgaagcgcccggaaggcgccagcgtcaccggctacttcatggccgggctgacggcgatggtcggcttctgggccacgctgtcgctgaacatccccgacttcagccgctatgcgcgtagccagaaggaccagatactcgggcagatcttcggcctgccgctgaccatgttcctgttcgccgccctcggcgtggtgatgaccgccgcctcggcttcgctggtgggcgagacggtttccgacccggtcagcctgatcgggcacatccccagccccggctgggtggcggtggcgatggcgttgatcatcgtcgccaccctctcgaccaacaccgcggcgaacatcgtctcgccgaccaacgacttccagaacatcgcaccgaaactcatcggccgcacccgcgccgtctggctcaccggtttcatcggcctggcgctgatggcccacgagttgctgaagaagctcggctggatcgtttccgacctcagcctggaaagcgtctactccaactggctgctcggctactccagcctgctcgggccgatcgcggggatcatggtggtggactacttcctggtgcgcaggcaacgcctcgacctcgccggactctaccgcgacgacgtctacccggcctggaactggcccggcttcgccgccttcgcggtgccggtggcgctgaccgtcatggccctcggcaaccgccagttccactggttctacgactacggctggttcaccggctcgctgctcggcggcgcgctctactacggcctctgcggccgccgtgcgcggagcccggcggcattggccaaaccgctgccctgatgggcatacaggcggccggcgagccgccgacacctactccaagcctgaggagacgacaatgagcactgcccggaacgtcctgcaatccacccagcgacacatcgatggccagcgcctctggcaatcgctgatggatctcgcccgcctcggcgccaccgccaagggtggggtctgccgcctggccctgagcgatctcgaccgccaggcccgcgatctcttcgtgcaatggtgcgaagcggccggctgcacggtcagcgtcgatcgggtcggcaacatcttcgcccgtcgtcccgggcgtaacccggacttgcccccggtgatgaccggtagccacatcgacacccagcccaccggtggcaagttcgacggctgcttcggggtgatggccggcctcgaggtgatccgcaccctcaacgacctcggggtggaaaccgaggcgccgctggaggtggtggtgtggaccaacgaggaaggctcgcgcttcgcgccctgcatgatgggctcgggcgtattcgccgggaagttcaccctggaggagaccctggccaagcgcgatgccgacggtgtcagcgtaggcgaggcgctggacgccatcggctacgcgggagcgcgcgattgtctcggacatccggtgggcgcctatttcgaggcgcacatcgaacaggggccgatcctcgaggacgaggagaagaccatcggcgtggtgctcggcgcgctcgggcagaaatggttcgacctgtccctgcgcggcgtcgaggcacacgccgggccaacgccgatgcacctgcgcaaggatgccctggtcggtgccgcggcggtggtcgaggcggtcaatcgcgcggccctcggccatcagccgcatgcttgcggcacggtcggctgcctgcacgcctatcccggttcgcgcaacgtgatacccggcgaagtgaagatgaccctggacttccgccatctgcaaccggagcgcctggactcgatgatcgccgaggtccgccaggtgatcgccgctacctgcgagaagcatggcttgcaatacgagctggtgccgaccgccgatttcccgccgctgtacttcgaccagggatgcgtcggcgcggtgcgcgaggcggcgcaggcgctgggcatgccgcagatggacatcgtcagcggcgccggccacgacgcgatcttcctcgccgaactcggtccggcggggatgatcttcgtgccctgcgagaacggcatcagccacaacgagatcgagaacgccagccccgacgacctggccgccggctgcgcggtgctgttgcgggccatgctcaaggcctccgaggcgatcgccggcggccgcctggcggcctgagtggcgcttccatcgaggcgccggcatcgaccgccttctacacgggtacggtagggcgaataacgccaggggcgttatccgccgatgcgcggctgggcggcggataaccgcgttgcggttatgcgccctacgtggtgctgcgcggggtacggtggggcgttatccgccgatgcgtcgctggggcggggcgcggggctcagatcaccttgccgtcgcgcagcctttccagcgcggccgcgtccaggccgaggagcgtctcgaggacctcgtcggtgtgctggccgagggtgggcggcgggttgcggtattccaccggcgtctcggacaggcggatcgggctggccacctgcggcaccgtcccggccagcgggtgcggtagctccacgcgcaggccgcgggcctgcacctgcgggtcggcgaacacctgcgccaggtcgttgatcggcccgcagggcacgccggcgcgctccagggaaagaatccactcggcggtggtgtgcagcaccgtggcctggcggatcagcgggatcagcacctcgcggttggccacccgcgccttgttggtggcgaagcgcgggtcgtcggcccattccgggtggtctgccagctcggcgaacttgcggaactggctgtcgttgccgaccgtgaggatcatgtcgccgtcggcggtggggaagtcctggtacggcacgatgttcgggtgtgcgttgcccaggcgccgcggcggcacgccggtggtcaggtagttgagggtctggttggccaggcaggcgacctgcacgtcgagcagggccatgtcgatgtgctggccgatgccgctgacgtcgcggtgggcgagggcggcgagcaccgcggtggaggagtacagcccggtgaggatatcggtcagcgccacgccgaccttcaccggaccggcgccttcctcgttgtcggcgcgcccggtgaggctcatcaggccgcccaggccctggatcatgaagtcatagccggcgcgcttggcataggggccggactggccgaagccggtgatcgaacagtagatcagcttcgggttgacctgcttcagcgattcatagtcgaggccataggccttgagcccgccgaccttgaagttctccagcaggatgtcggccttggccgccagttcgcgaacgatgcgctggccttccggctgggtgaagtccaccgtcaccgacttcttgttgcggttggccgacaggtagtaggccgcctcgctggtgtcgttgccttcggcatccttgaggaacggcgggccccaggcgcgggtgtcgtcgccgctgccggggcgctcgatcttgatcacctcggcgccgaggtcggcgaggatctgcccggcccaggggccggccaggacacgggacaggtcgagtacgcggatatgggaaagggcgccgggcatgacggttctcgctgctgggggctggaaacggaaatggccgggaagacgggttccttgcccgtctccccggcggccggcgcgctaccgtgaaaaagcgcgccggggtgttgctcggtggctcagaagaatgcctggatgccggtctgcgcgcggccgaggatcagcgcgtggacatcgtgggtgccctcgtaggtgttcaccacttccaggttgaccaggtggcgggcgatgccgaattcgtcggagatgccgttgccgcccagcatgtcgcgggccaggcgggcgatgtcgagggccttgccgcagctgttgcgcttcatgatcgaggtgatttccaccgccgcggtgccttcgtccttcatccgccccaggcgcaggcagccttgcagggccagggtgatctcggtctgcatgtcggccagcttcttctggatcagttggttggcggccagcgggcggccgaactgctggcggtcgagcacgtactggcgggcggtgtgccagcagaattcggcggcgcccagggcgccccaggagatcccgtagcgcgccgagttcaggcaggtgaacggaccgcgcaggccgcgcacttcggggaaggcgttctcttccggaacgaacacgttgtccatcacgatctcgccggtgatcgaggcacgcaggccgaccttgccatggatcgccggggcgctcagaccttcccagcccttctcgaggacgaagccgcggatctgcccttcgtcatccttggcccagaccacgaagacgtcggcgatcgggctgttggtgatccacatcttgctgccgctcaggcgatagccgccgtcgaccttcttcgcccgggtgaccatcgagcccgggtcggaaccgtggttcggctcggtcaggccgaagcagccgatgtattcgccgctggccagcttgggcaggtacttctgccgggtggcttcgttgccgaattcatggatcggcaccatcaccagcgaggactgcacgctcatcatcgagcgatagccggagtcgacgcgctcgacttcgcgagcgatcaggccatagcagacgtagttgaggccgctgccgccgtaggcttcgggaatggtcgcgccgagcaggccggtctcgcccatctcgcggaagatcttcgggtcggtctgttcgtggcggaaggcttcgagcacgcgcggggccagcttgtcctgggcgaactgctgggcgctgtcgcgaaccatgcgctcttcttcggtgagctgctggtccagcagcaggggatcttcccagttgaagctagctttggtggccatgcgtacatcctcgtcaagcggtagcggaggctggcgtgggccagccggaatggaagcatcctaagagcctagcgaatggggcggcaaacgaggaattcgcacgcacttgtgctattttctcactccgagaaaatgagtctcgtatttcatgcccttgaagaggcgcgaggaatcgtgacctgggcgtcatagatgcgaaaccggcactccggagtcctccatgcgacgcaagatcccttccaccgccgcgctggtcagcttcgaatccgccgcgcgccacgagagcttcaccaaggcggcggaggagttgtccctgacccagagcgcgatctgccggcagatcgccacgctcgaggagttcctcggtgtcgagctgttccgtcgctcgcggcgcggggtcaagctcaccgaggccgggctgtcctatagccggcgggtggcggtacgcctcgacgcggtggagcgcgacaccctggcggtgatggggcaccagggcggcggcgcgatcgaactggcggtggtgccgaccttcggcacccaatggctgttgccgcggctcaagcgtttccagcggctgcacccggaggtcacgatcaacctgaccaaccgcacccgcccgttcctcttcgccgacaccgagttcgacgccgcgctgtacttcggcgacgccgactggtcgggtaccgtctcgcatttcctgatgcgcgagaatccggtgccggtgtgcagcccggagctgctgggcgggcgtcgaacgctgagcgccgagcaggtcgccgggctgccgctgatgcagcagagcacccggccctacgcttggcgccagtggtttcactcccagggactgaacgtcgcccacgacatgagcgggccgcgctacgagctgttctccatgcttgcccaggcggccatgcacggcatgggcgtggccctcataccgcccttcctgatccaggacgagctggccgacggaaggcttatcgtgcccatgcaacatgcctatttgagcgagaatgcgtattacctgatcattcccgagcgcagggtcgaatcggcgatgctcaatgccttccgcgactggctggtggaagaggccaggcagtaccgcgaggccaacgggctgggctgaacgcgcaggaacatcgggtggcgcaggcaggacgcgccgccccgggaccgggccgatccgccgggtcccgcggagccgcggcggcgataccgccgggcatcctccacgacggccaggatggcggccgtggggcaccacaccaggagttcacatgaatttccacacccgcaagtgggtcaagccagaagatctcaaccccaacggcaccctgttcggcggcagcctgctgcgctggatcgacgaagaagcggcgatctacgcgatcatccagctgggcaaccagcgcgtggtcaccaagtacatttccgagatcaacttcgtcagctcggcgcgccagggcgacatcatcgagctgggcatcaccgccaccgacttcggtcgtacctcgctgaccatgacctgccacgtgcgcaacaagatcacccgcaagagcatcctcaccatcgacaagatggtcttcgtcaacctcggcccggacggcctgccggcgccccacggcaagaccgagatcacctacatcaaggaccagttcaaggaagacgaagtcctgccctgatcggcgcgacgagcggccggcacccgtgccggccgccgtgtttcagaacagccgggtgagcagccagtagagcgaggccgagagcaggatcgccgccggcagcgtcagcacccaggccatcagcaggttgcggatggtcttccactgtagtcccgaaccgttcgccgccatggtcccggccaccccggaagacagtacatgggtggtggataccggcaagccatacaggtccgccgcgccaatggtcagcatcgccacggtttccgccgaggcgccctgggcgtaggtcaggtgggtcttgccgatcttctcgccgaccgtcaccacgatgcgtttccagccgaccatggtgcccaggccgagggcgatggccacggcgatcttcacccatagcgggatgaacttggtggcgtcgtcgatcttctgcttgaacgcctgcaatttgccgcgggtgtcggcgtcgaagcggccgacgccgtccttgtccatcaggcggatcgcctcggaggtcaggtacatgtcgttgcgcacgttgcccatggcttccgccggtacccgcgagaacgcgccatagcctttcacttcctggccgatcgagccggccagggcggccagcgccgggatcagctcaggcgatgcctgcttgctgcgcacgtagtcggagagtacctggcgcggatcggccggcgccggttgcggcgcgctcttcaccagcgcttgctgggtgacctcggcgacggcggcgaactgcaccgcctggtccgccggcatggtgcggttcagggcgtaggccatcggcagggtgccgaccaggatcagcatgatcaggcccatgcctttctgcccgtcgttggagccgtgggcgaaggacaccccggtacaggtcaggatcagcaggccgcggatccaccagggcggcggcgccttgcccttcggcgccttgtacagcgcgcggttcttcaccagcaggcgcagcgccaggagcagcagggcggcgcaggcgaagccgatcagcggcgagagcagcagggaatagccgaccttggtcgcctggccccagtccaccccgctggtgccgtcgcgcccgtgcatcagcgcgttggccacgccgacgccgatgatcgagccgatcagggtgtgcgaggacgacgccggcaggcccagccaccaggtcccgaggttccacaggatggcggcgatcagcagggcgaagaccatggcgaagccggccgaggaaccgacctgcaggatcagttccaccggcagcagggcgatgatgccgaaggccaccgcgccgctggagagcaatacgccgagaaagttgaagcaacccgaccagaccaccgcgaagtgcggcggcagcgagtgggtgtagatcaccgtggccaccgcgttggcagtgtcgtggaagccgttgacgaactcgaagccgagggcgatcagcagggccacgccgagcagcaggaagggcgtccaggtggtgatcgcggaaccgacgtcatcgacgtcctgcatcaggctgtaggcgctgaacagcagtccggtggcgagcacggcgaagaatacgaaggcggtgaggcggccgggacgctgctcgagatggggcttgtgcgcgttgccggcggcactggcgacggcgacggcgggaaggacatcggaggtcatggtgcgggtccgcgctggggatgaccggcacatgatgggcaggcgattgtgacaagttatgtctttcgcataccggcttcgtctggcgaagaaaggacaagggccgcgggaggccgccggaagccggatggggtcgggcgccaggcggcctgcccgctgcggccgcgaagattaatgaattcctgtggcgagtgccatcatttcgtcgctaaaaagttggcatgttgagggatttgccgatccggacacgcgcggggaaggcgagagccactggactagactgagaagtgcgcggcggggccggtcgcttgccggcccggtgcgcgggacgagcgccttcgtcccggggtggcccggccgggcggtcggggaggtcgatatgcggatgccgtgccggctcgcgctggcgctgttgctgtgcttcgccggcccggcctgtttcgcggcctccggaccggtacgggtgctctcggtggatggtgcgatcggcccggccagcgccgattacctggtgcgcggcatcgagcgtgccgccgaggacggcgcgcaactggtggtgctggaactggacacgcccggcggcctggacgcatcgatgcggcgcatcgtcaaggcgatcctcgccagccaggtgccggtcgccggtttcgtcgcgcccagcggggcgcgggcggcgagcgccggcacctacatcctgtatgcctgccatatcgcggcgatggcgccgggcaccaacctcggcgccgccaccccggtgcgcctggggacgccggacaagcccgcagagaagcccccggcgcgggacgccgaacccatgatgcgcaagcaggtcaacgacgccgccgcctatatccgtggcctcgcgcagttgcgcgggcgcaacgtcgaatgggccgagcgcgcggtgcgcgaggcggtcagcctggcggcgcacgaggcggcggcgcagaaggtgatcgacctgcaggcccgcgacctgcccgacctgctgcgccagctcgacggccgcagcctgcgcgtcggcgagcgcgcgcttaccctggctaccgccggcgccacggtcgagcgccaggcaccggactggcgcgcgcggttgctggcggtgctcaccgatcccagcgtggcgctgatcctgatgatgatcggcatctacgggctgatcttcgaactggccaatcccggcatggcgttgcccggcgtgctcggcggcatctgcctgctgcttggcctgtacgccctgcagatgctgccggtcaactacgccgggctggcgctgatcgcgctgggcttggcgttcatggtgggcgaggcgttcgtcgccagcttcggcgtgctcggcatcggcggaatcgtctcgttcgtggtcggcgcgctgatcctgatcgataccgaggtgcccggctacggcattccgcccggcctggtggtggccttggcgttgctcagcgccgcgctgatcgtcggtctgctgggcatggccctgcgtactcgccggcaagcggtggtaagtggcaccgccggattggtcggcagcctggcgacggtggcggcggtggattccgaacaaccctgcgcaggctgggtgcagctccagggcgagcgctggcgggtgctcgccgcgcggccgctggcggtgggccagccggtctgggtgctggcgcgcaagggcctgctcctggaagtcgcgctggccgatgaaggaggtggatgatgggtatttcctatggtttggcgatgttgctggtgttcctcgcgctgctgctgttcagcgcgctgcgcatcctccgcgagtacgagcgcggcgtggtgttccagctcgggcggttctggaaggtcaaggggccggggctggtgctggtgatcccggcgatccagcagatggtgcgcatcgacctgcgcaccatcgtcctcgacgtgccgccgcaggatgtgatttcccgcgacaacgtttcggtgaaggtcaacgcggtggtgtacttccgcgtgctcgatccgcagaaggcgatcatccaggtggagaactacctggccgccaccagccagttggcccagaccaccctgcgcgcggtgctgggcaagcacgagctggacgagatgctcgccgagcgcgagcgcctgaacctggatatccagcaagtgctcgatgcgcagaccgacgcctggggcatcaaggtggcgaatgtggaaatcaagcacgtcgatctcaacgaatcgatggttcgcgccatcgcccggcaggccgaggcggagcgtgagcgcagggccaaggtgatccatgccgagggcgagctgcaagcctcggagaaactcatgcaggcggcgcagatgctcggccggcagagtggcgccatgcagttgcgctacatgcagaccctcggcgcgatcgccggcgacaagagttcgaccatcgtcttcccgatgccgatcgaactcttcggcggcaagtacgcaggtgccgcgccgcggaacgaaaaggccgccggagaggaagaggagaggtgaacgcgtgcggtttgtgatggaaatatcatcgagccgcgacacggggacatgcgtgcccggggtcgggatggctatgctgtggcgatccactcccgggacgctccttcatgctgcgatgcgcactcctgctgctgacattgctcctcccttgcgcgctgcctgccgccaacctgcgcctggtcggcgactcctggccgcctttcgtcgattcgcgcctgcctggcaacggcctggcggtggaactggtgaccaccgcgctcaagcgcgccggcttcgactcgagtttccagcaggtaccctggtcgcgtgccctgtacggcgtgcgcagcggcgactacgacatcgccctgagcgcctggtacgagcccgcccgcagcctctacgggcagttttcccgcgcctacctgagcaaccgcatccgcctgctgcaacgcaaggggcggggtatcgagttttcccgcctgagcgacctgcgtccctaccgcatcgcggtcgtgcgcgactatgcctacgcgcccgaattcgaccgtgacagccgtctgcagaaggtcaacgtgaccagcttcgccaacgccgcgcggatgctcgaggcggggcgggtcgacctggcggtggaggacgagctggcgctgggggtcgccttcaagggcgaactggccgatttgcgcgacaagctggaggtactgcccatcccgcttggcgagaacggcctgcacctgctggtgagcctgaggaatccccggcatgacgagatcgtcgacggcttcgacctggccatccgcggcatgcgcgacgacggcagctaccagcgcctgctggagcgctacggcgcgcgctagggctggcctggcagtggctgcgcgccggccagttccttcttcagcaagtgcgcggccagggtgcgcagcggggcgagctggcggcagatgtgcgccagttgggtctgtaccaggcgatggctgtcgtccatgtcctcgggcatctgctccagttccttggccagcgcttcctcctcttcgctgtagatggcgaccgggcgtttctgttccaggctcgcggcgatttcctcgaggctggcggagagccgctcggcggcgcgctccaggaggccgtcgctggcgtcctcgggcaggctttcgcggtgcgcgccgagaccggatagatagctgagcagggtgtgcgagaggaccaggaagcggaagccgatctcggcgtccttcctgaagtggccgggttccaggagcatgttcgacagggtggtcgagagcgccgcgtcggcgttgtgcgcgttgcgccgggcggtgcggtagtcgaggtcgtcgcgcttgccggtggcgtactgctgcatgatctgccgcaggtagcggctgttgcaggcgagggtgttggcgagcatgcggttgagccggcggccctgccagtcgggcagcaccaggaacaccgcgaggccggcgatcaggctgcccagcaaggtatcgaacaggcggggcaggatcagcccgtagccatcgccgacctggttgaagcagaacagcaccagcagggtgatcgccgccgtcgccagggtatagcgactgctgcgggtggcgaagaaggcgaccccggcggcgaccgcgaacagcgactgcaccagcgggctggggaacaggtcgatcagcgcccagccgaccaccaggccgaccaccgtaccgaggatccgctgcaccaggcgcaggcgggtcgcgccatagttgggctggcagacgaacaccgtggtgagcagtatccagtagccctgggtcggatggatccagtgcagcacgccgtagccggcggtcagcgccagggacatgcgcaggccgtggcggaacagcagcgaggtcggggtgagctgctggcgcaggcgctcgaaggcgtccttcaggctgcgcggcgagcggtcgagcagggcgctgtcctgttcgtcggcgatggcgtccgggttgctcgccccggccagcttgcggtccagcgtggtgaggttggcggccagggcgccgagcgagcgcagcaggcccttccaggccgggttgctctgctggcgcaggtgttcgagcgaggcctggaggtcctccagggccagctcgcggtcggcgtagtcgaacggctggcgcaggcggatagcccgcgccagggcctggcaggccttgccctgctggttgagcaggcgctggcagcggaacagcacgtcgctgtggaagaacgcctcggccagccggttgtacgggtagtgcgaggaactggcgcgctcgtggacgtcctgggcgatgaaatagagcttcaggtagcggctcaccttggggcccggccggccatggccgagacggttgagaatggtctccttggcctggttcagcgccaccaccaccttgccgttctgccgtgccagggcgaggcgctggccctccacgtcgagctggcgcaacggttcgaacaggctcgacttgatcctcaggtattcgcccagctcgaaatacaggcgggaaagactctgctgcaccggctggttggagaacagcgcgttccacagtaccgagagcagcccgtaccaggccgccccggccaccagcagcagcggttcgtgccagacatcggcgacctcgccgccgcgctggtccacgccgatcatggtgtagatcgagaggatcagggtcgccgaggcgatcgccgcatagcgctcgccgagggcgccgaggaggatcatgccgaacgccgacagcgccatcccggaaacgaacagccagggataggggaacagcaactcgacggcgaaggcggcgacgctgaagcacagcagggtcaccagcagcgcttgcaggcggccgagccagttgtcgtcggtctccgccagggcgctggcgatgatcccgaggaacagcgggatcagcagctcgatgcggtcctgccaccagcacagcagcagggcgccggccagggcgatgaacacccgcaggctgtaggcgaacttgtcgagggcccagaggcggcggagcgtgtgtgtcaacgaagagggcggcatggggcggagtgctatccgatggtccgtggttcagcctatgtggcctgtccggctaattcaatcggccgatttcgcgcgactggaagtccgctgcccgccgcagtcgcaggaaacgctgccgtgggcaactcggtcgagccgggcatctggcggatgcaggcttcgtgcctgcgaacgctaagacgtcgtcgccgcgccgaacgttacccggcggcgatatcgcgcgccggagcgggcccggcgagcgaagcggcggcgcgctaaagcaggcggaccttgaacgagcgacccttgatcttgccttcgctcaggcgcttgagggcctggtgggcgaggccgcgctcgatggcgacgaaggcctggaagtcgaagatggcgatcttgcccaccgcgctgccgggcagcccggcgtcgccggtgagggcaccgagcaggtcgccggggcgcaccttgtccttgcgtccgccggcgatgcacagggtgctcatcggcggcagcaatggttccgggctggccttcaactggccgagggcgtaccaggccagcggctgcttctgcaggtcctcgatggcctgcgcgcggctggcctcggccggcgccaccagcgacagggccaggcctttctcgccggcgcgaccgctgcgtccgatgcgatggatgtggacctccgggtcacgcgccagctcgacgttgatcaccgtttccagggcggcgatgtccagcccgcgggcggccacgtcggtggccaccagtacgttgcaactgcggttggcgaacaccgtcaggacctggtcgcgctcgcgctgctccaggtcgccgtgcagggccagggcggaaatccgctgcgccttcagtgcgtcggccagctcctggcactgctggcgggtctggcagaaggccacgcaggactgcggccggaaatgctggagcaggcgtaccacggcgtccatgcgctgcttcggatcgatctcgaagaagcgctgctcgatctggctgtcggcgtgcagcgactcgaccttcacctgtcgcggatcgcgcatgaaggtcttcgccagcttctcgatgccgtccgggtaggtggcggagaacagcagggtctgccggcgctcggggagctggccgatgatctcggcgatgctgtcgtagaagcccatgtcgagcatccggtcggcttcgtcgaggactagggtattgagcccgtcgaggaccagggtgcccttgcgcaggtgctcctggatgcgccccggggtgccgaccaccacgtgcgcgccgtgctccagcgaagccacctgcgggccgtaggggacgccgccgcagagggtcaggaccttgatgttgtcggcggcgcgggccagccggcggatctccttggcgacctggtcggccagttcgcgggtcgggcacagcaccagcgcctggcagccgaagtagcgcgggttcagcgggctgagcagggcgaggccgaaggccgcggtcttgccgctgccggtcttggcctgggcgatcaggtcgtggccctggaggatcagcggcaggctctgcgcctggatcggcgtcatctcccggtaaccgagggagtcgagattggccaggaggtccgcggaaagcggcagcgaggagaaagcggtggaggtcacggggcagggctcggcaggcgatacgagcggctagtctagcagcctgcggcggcttgccgcgtgcgatcgccgccggagcagcagcgacaggcaatgtatctttggccagtaccgttcgtccgaaaaacgaaaaaagcgcgtttctgtatttttatacaggttcgctttcctcagttttttgtcgtagagtgctgacactgtgtttgcatgggtcgccgtcgatcgtgacctgatgcggtcggaaattccagcccgtcctgctcgactccttgtaactccttgcaactcagttaccggctacgatttcgtggctaaatcaatacccatagttccaaggagaacttgcaatgtcccgtcagaacggcaccgttaagtggttcaacgaaaccaaaggctacggcttcattaccccggaaagcggcccggacgttttcgttcacttccgtgccatcgaaggtaacggcttcaagaccctggccgaaggccagaaggtcagcttcgaagtcgtacaaggccagaaaggcatgcaggccgagcgcgttcaggtgatcaactaagatccctgggccccagcccgaagaacccggatggaagcatccgggttttttattgcccggagaaaaccgtcacactgtcttcgcctgccgttcaccctgtcttgacgagttcccgcccagagtggcccggtcccgttcggagtcgtttcgatgaagcctgtgcaatcccgtcgtctggccttcgccgcgctgttgtcgctgtcgttctcttccgcgtcctgccatgccgccaccgagcactggggctggatcgagcagtcctggctgatgcccgagcgcatgcaggccaaggccaagctggataccggcgcgctgacctcgtcgctggacgcgaggaatatccatcgctacaggaaggacggcgagcgctgggtgcgcttcgatgtcgtgctgcccaccgccgacagcaaggcgccggtcagcgtgaccttcgagcgcaaggtgctgcggctgatcaaggtacgcggcgccggcggcagcgacagccgtccggtggtggcgatggacatctgcctgggcgccaagctgctgcgcgagcagttctccctgcgcgaccgcggcaacatgaactatccggtgctgctcggccgccgcacgctcgaacacctcggcgcggtcgacgtgtcccgaaccttcacccgcaaacctacctgcagcgcgctcgccgctcagtagaagaaccagcgcagcagtccagcgcccagcgccacccagaacagcacgatcagcgcagccatccacaggttgcgcgggtgcgtctcgacctcgcgagcccgcgcgcggcactcggcgagcagcgtgggaggggtgaggcggatcgccagccagatccccagcggcaccagcaacaggtcgtcgaggtagccgagcagcggtatgaagtccgggatcaggtcgatcggactcagcgcataggccaccaccagcagagccagcagtcgggccagccagggcatgtgcggatggcggctgcacagccagagggcgatgacctcggtcttcagctcgcgagcccagcgcttgagcgtagcgatccaggccatcctagaggtccgggtccttttccggatcgacccggcgcgggctggtgcgaccgtcctcgctgccgagctggaagaagatcgccgcggccagcatcgacatcaggccgacgctgacataggtggcgtggaaggcgccgagtacggtgtcctgccccgtatccaggtcggtctggaaaccgcccagcaacgccgccgcgcaagccacgccgaggctgatcgacaactgcacgaccaccgacatcaggctgttgccgctgctggcgttgctgtcctgcaggtcgatcagggtgagggtgttcatcgccgtgaattgcagggagttcaccgcgccgagcaggctcaggtgcagcagcagccagacgtagggggtgtcctggtcgaccaggccgaagccggcgatcaggcagccgaggatcagggtgttgccgaccagcagcttgcgatagccgaagaagtccagcagtggcttggccatcggcttggcgaccatcgcgaacagcgccagcgggatcatggtcatgcccgcggtggagggcgggtagcccagtcccacctgcagcaacagcggggtgaggaagggcagggcgccgctgcccaggcgggcgaacaggttgccgaggatgccgacggcgaaggtccgcgccttgaacaggctcggtgggaacagcggcttgtcgatgcgtagcgcgcgcagccagtaggcggtgagcaggaccagtccgccgatcagcagcaggaccacgcgcaggtgcgacaggtgcagctcgccgagtccttccagggcgatggagatcagcaccatggagccgccgaagagcaggaagccgatgctgtcgaaacggctcggcaccgggctgcgcaggtccggcatcagcttcatcgccaccaggcagccgagcaggccgaccggcaggttgatcaggaagatccagtgccaggaggcgtactccaccagccagccgcccagcgtcggtcccgccagcgggccgagcaggccgggaatggtgacgaagctgagcacccgcaccaggtcctggcgcgggtagacgcgcaggatcaccagccgtcccaccggcatcatcagcgcgccgccgacgccctgtacgatgcgcgccccgaccagcagttcgaggctcggcgacagcgcgcaaagcaacgagccgaggctgaacagcagtaccgcgccgaggaacacccggcgcgtgccgaaacggtcggcgatccaccccgaggccggtatcagcagggccaccgtgagcaggtaggcgatcaccaccgcctgcatgcgcagcgggttttcgttcagcgaactggccatgctcggcagcgcggtgttgaggatggtgccgtcgagggcttgcatgaagaaggcgacggcaaccagccagggcagttggcgggcgatgcggggggtgagctggaacggctcgctcatggacgggctccctcgggcggacagggcccaagcatagagaagttctcgccgcgatgggacggccggcgaccggatcggggcgaacagcgggcattgcggcggaagtcgcggccagagaggtcgcctttcattgtcctgggtcaagccgaagcgctggcgctcgccggctgctgtgctagtactcaagagtcaccccgtcagtggctgcggatgcgacgtcggcgcttcgtcatcgcacggacatgtcccgcgttgcatgctcgacggcgcgtgcttcaccgccttgtcgcgatgttctccacgcagcgctcggcgaccccggtcgccgctgccgtcgccgaagcccaccttccgtggaaacaggagtcctcccatggcccaggaactttgcgctatctgccacgaacgtcccgccgtcgcccgcgtcagcctggtacagaacggccagcgccgcgaactcgccctctgcgaactgcactaccgccagttgatgcgccagcagcgcatgcgctcgccgctggagtcgctgttcggcggcggcagcccgttcgacgagatcttctccggcttcggcgagcagagcccggtcaccccggtgcgcgcccgcgagccggaggcggtggacatcgccgaatacttcagcaagcagaccaccgagtacctgcaacgcgccgcgcaggtcgccgccgaattcggcaagcgcgaagtggacaccgagcacctgctctacgccctggccgacgccgacgtggtgcaggcggtgctcaagcagttcggcctgtcgccggccgacctcaagcagtacatcgaggccaacgccgtgcgcggcgccagcaagggcgaggcgagcgaggacatgaccatctccccacgggtgaagagcgccttgcagcatgccttcgccctgtcccgcgagctcggccacagctatgtcggccccgagcacctgttgctcggcctggcggcggtgccggacagcttcgccgggacgctcctgaagaagtacggcctgaccgagcaggcgctacggcagaaagcggtcaaggtggtcggcaagggcgccgaggatggccgcgtggacggcccgagcaacactccgcaactggacaagttcagccgcgacctgacccggctggcccgcgaaggcaagctcgatccggtgatcggccgctcgaaggaagtcgagaccaccatcgaggtgctcgcccggcgcaagaagaacaacccggtgctgatcggcgagcccggcgtcggcaagaccgccatcgtcgaaggcctggcccagcgcatggtccagggcgaggtgccggaggtgctgcgcgacaagcgcctggtcgaactgaacatcaacgccatggtcgccggcgccaagtaccgcggcgagttcgaggaacgcctcaagcaggtgatggacgaactgcaggcggcgcagagcgagatcatcctgttcatcgacgaggtgcacaccatcgttggtgccggccagggcggcggcgaaggcgggctggacgtggccaacgtgctgaagccggcgatggcgcgtggcgagatgaacctgatcggcgccaccaccctcaacgagtaccagaagtacatcgagaaggacgccgcgctggagcggcgcttccagccggtgttcgtccccgagccgacggtggagcagaccatctccatcctccgtggcctgcgcgacaagctcgaaggccaccacaaggtgaccatccgcgacgaggccttcgccgccgccgccgagctgtccgaccgctacatcggcaaccgcttcctgccggacaaggccatcgacctgatcgaccaggccgccgcccgcgtgcgcatcgccagcacctcgcggccggccgagatccaggaactggaggccgagctggcgcagctcaagcgcgagcaggactacgccgccagccgcaagtggtacgacgaggcgaaggtcttcgagaaacgcatccaggaacgcaaggaacacctcgagcagatcaccgagcgctggcagcagacccaggggtcgaagaccgaggaggtgcgggtcgaggacatcgccgagatcatctccaggctcaccggcatcccggtcaccgaactgaccgccgaggagcgcgagaagctcctgcagatggaagagcgcctgcaccagcgggtgatcggccagcaggaagcgatcaccgcggtcagcgacgccgtgcgcctggcccgcgccgggctgcgccagggcagccggccgatcgccaccttcctgttccttggcccgaccggggtgggcaagaccgagctggccaaggccctggccgaggtggtgttcggcgacgaagacgcgatgatccgcatcgacatgagcgaatacatggagcgccacgcggtgtcccggctgatcggtgcgccgccgggctacgtcggctacgacgagggcggccagctcaccgagcgggtgcgccggcggccttacagcgtgatcctgctcgacgagatcgagaaggcccacgccgacgtcaacaacatcctcctgcaggtgttcgacgacggccgcctgaccgacggcaaggggcgcgtggtggacttcaccaataccatcatcatcgccaccagcaacctaggctccgagctgatcatgaagaacgcccaggccggcgagttcgcccagccgccggagaagctcaagcgcgaactgatgactaccctgcgcggacatttccgcccggaattcctcaaccgcctcgacgaggtgatcgtcttcgagtcgctgagcaaggcgcagatcgaggacatcgtgcgcctgcaactggagcgggtgaagcgcgccgcgcacgctcaggacatctacctgcacatcgacgacagcctggtcggccacctcgccgaagaggcctaccagccggagttcggcgcccgcgagctgaagcggcagatccgccagcaactggagacgcgcctggccacggcgatgctcaagggcgaggtgaaagagggcgagacggtcaccttcttctacgacgccaaggacggcgtcggctaccgcaagggcgccgcgccgaagccggcggcacgcaagaaatccggcgccggcgagacgcccaagggccgcgcgacggcggcgaggaagccggcggcgaagaaaggcgccgccgccaagggcaaggccgacaagccgaaggccaagtgacccgaccaaggttggggaacaaggcaccggccggccggtcgaaatctcaccccggcctgcgaatgcggccggggcgttcgatatctcatgaggaattgccgatgcgcgtcaccacccacgctaccctggccgcggccctgctgctcagcgccgcctccgcgttcgccttcaatctcggggatgccgccaaggcggtcgccggggcatcccagggcgactccgcccaggtagccaccaccccgcagaccagcggtctgctcggcgcactcaccggccagctcggggtcagccaggagcaggcggtcggcggtaccggcgccctgctcggcctggccaagaaccagttggccggcaacgattattcgcaactggttaagaccatccccggcctcgacaagctggccggcaacaacgccctggccggtctcggcgggctcggcaacgtgctcggcaagagcggcggcgacagcaagggcctcggttcgctgctcggcaatgcggacagcatgggcgacgtgaacaaggccttcggcaccctgggcatggatagcgggatgaccgagaagttcgcccaggtgctggtcgactacttcggcaagcagggcgccaacagcgagctgctgggcagcctgagcaatctctggggagtgagcaaggcgggcggctcgtcgctgctctgatctgccgccagcggatcggcggataaccgcgttgcggttatccgccctacgaagtgggtgcggcgcccgggtattcgctgcccgcaccggtagggcgaataacgccctcggcgttatccgccgccgctccgtggaaacggcggataaccgcgttgcggttattcgccctacgaggtgggtgcgacccccgggtattcgttgcccgcaccggtagggcgaataacgcccccggcgttatccgccgctgcgccgtggaaacggcggataaccgcgttgcggttattcgccctacgagatgggtgtgcttcggccggtacttcagcgcagttgccgcaagcgggcgatgcgttcgtccttttcttcccacatgcgcgagacccattcctgcacgtactggcggaacaccgggtcgttctcgtagtcgccctgccacagggcgggatcgatcggccgggtctggatgtcgacgatcaccttcggcacccgtccgcagagcaggtcccagaatcccggaaccttgtcgctcgggtagaccacggtgacgtcgagcagggcgtccagctgctcgcccagcgcggcgaggacgaaggccaccccgccggccttgggcttgagcaggtggcgatagggcgactgttgccgggccttcttctgctcgctgaagcgcgtgccttccaggtagttcaccacggtcaccgggatgcgcttgaacttctcgcaggcggccttggtgatctccaggtccttgcccttgagttccgggtgcttctccaggaaggccttggaatagcgcttcatgaacggatactccagcgcccaccaggccaggccgaggaagggcacccagatcagctccttcttgaggaagaacttgaagtacggggtgcgccggttgaacacctggatcaaggcggggatgtcgacccaggactggtggttgctcaccaccaggtacgaggtgtcctggcgcaggtcgccggcgccgcgcacgtcccagaccgtcggcgtgcaggtggcgaagatccacttgtcgatctccgcccaggtctcggcgatccacatcacgcccctggagcagagatccttcaggcgctggccggggagcaccagcttgagcagtgcgatcagcatcatcgggccgatcaggatcagcgtgttgagaagcagcagaaggctgctggtcaggccggtcaacagttcccgcatggttggtttccctgtcctgggtgtggggcgacgcggcccatcatacgcatccgcgccgcgccgcccaagccgccggcgtggcgaacgaaaccgcgccgtgctagtcctatgtggatctcgtatcacttcaggagatgcccgcgtgaagcgtgcccttgccttgctctcgctgttcgctctgccggtcctcgccgccgagcccaacctctacggccgctacgaatgggtctccctgccggagctggaccgcaccctgcaggcgaagatggacaccggcgcctacacctcctcgctgtcggccaaggacatcgagttgttccagcgcgacggcgaggagtgggtgcgcttccgcctggccaccaaggaggccgacggctcggtgttcgagcacaagctggcgcgcatcggcaagatcaagaaccgcgccgacaaccgcaacggcgaggacgaggatgaggaccgcctgagcgaacgcccggtgatcgacctgcaggtctgcctgggcggagcgatgaagaccatcgaggtcaacctcaccgaccgcagcgccttcaactatccgttcctgatgggcaccaagggcttgcgcaaattccacgtcgcggtcgatccctccgagcgcttcgtcgccgacaagcccacctgcaagtaagcgtcctacgccaccggcggcgcgattgacgcgcgcgccggcttgcggcaccgttccggcattcccgtcagccgccgtcacgccatgccgcatatcctgatcgtcgaagatgaagccgcgattgccgacaccctgctctacgccctgcaggccgaaggcttcgccaccacctgggtgaccctcgccggcgaggcgctggcgttgcaggagcgccagccggcggacctgctgatcctcgacgtcggtctgccggacatcagcggtttcgaggcctgcaagcgcctgcggcggttctccgaggtgccggtgatcttcctcaccgcgcgcgatgccgagatcgaccgcgtggtcggcctggagatcggcgccgacgactacgtggtcaagccgttcagcccgcgcgaggtggcggctcgggtcaaagccatcctcaagcgcatggcgccgcgcccggcggcgctggaagaggccacgccgagcgggccgttccaggtcgacgaggagcgcgtgcggatccactaccgcgacaccccgctcaacctcacccgccacgagttccgcctgttgcagacgctgctcgggcagcccgagcgggtattcagccgcgagcagttgctcgacgccctcggcgtcgccagcgaggccggctacgagcgcaacatcgacagccacatcaagagtctgcgcgccaagctgcgccaggtgaacgaacgcggcgaagcgatccagacccatcgcggcctgggctacagctacagcccggaccacgcctgatgccgctcggcgttcggatcttcctggtctacttcctgttcgtcggtctcaccggctacttcgtgctgagcacggtgatggacgaagtgcgccccggcgtgcgccagtccaccgaggaaaccctggtggacaccgccaacctgctcgccgagatcctccgccaggacgtgaagaacggcaccctggcacagagcgacctgccggagatgctcgaggactacggcaagcgggtgccgcaggcggatatctggggcttgcgcaaggaggcggtgaaccaccgcatctacgtcaccgacgccagcggcaaggtgctgctggactccgccggggtggccgtcggccaggactattcgcgctggaacgacgtctacctgactctccggggccagtacggcgcgcgctccagccgcgaagacccggacgacccggattcctcggtgatgtacgtggcggcgccgatcaaggatggcgggaagatcatcggggtggtttcggtggccaagccgaacagcagcctgcaaccctacatcgaccgctcgcagcggcgcctggcctggctcggtgccgggctgatcgccctcgggctgctggtcggcggcctgctctcctggtggctcagcggcgcgctgcggcgcctcacccagtacgcacaggcggtcagcgaggggcgccgcgccgagctgccgcgctatcgcggcggcgagatggcgcaactggccgacgcggtggaacgcatgcgcacgcaactggaaggcaaggactacgtcgagcgctacgtgcataccctgacccacgaactgaagagcccattggcggcgatccgtggcgccgccgagttgctcgacggcgagatgccggccgagcagcgggcgcgcttcgtcggcaacatcgccggcgagagcgagcgcctgcaacaactgatcgagcgcctgctgagcctggcccaggtggagcagcggcaaggcctggaggaggtcggcaaggtcgacctgcgggagatcgccgcgtccctgctggaaggccaggcggcgcgtatccagcgccagcgattgcgggtggagaaccgcctggaaggtccctgcgaggttcgcggcgagcagttcctgctgcgccaggcgctggccaacctgctcgacaacgccctcgacttcaccccgcccggcggcatccttcgcctgctcgccgaggtcgacggcgagggtatcgccttgcgcctgttcaaccaggggccggcgattcccgactacgccctggcgcgcctcaccgaacgcttctactcgctgccgcgcccggccagcgggcgcaagagcaccgggctgggactgaacttcgtcgccgaggtggcgcaactgcatggcggccggttgcaggtcggcaaccgcgacgacggcgtcgaggcgctgctctggctgccgcgcggctgaggcgcctccacggaaactccatcgactctccacacggcgacccgaagcccgccatcgcggcgccgcagactttccgccatcaccccgacggagagtccccccatgaaccgcacgctggcctacaagctcggtgccatcgccctactcatcctgctattgctgattcccctgttgatgatcgacggcctgatccgcgatcgccaggaggttcgtgacggcgtgctgcaggatatcgcccgcagctccagctacagccagcgcctcaccggcccgctgctggtggtgccgtaccgcaggacggtgcgcgagtgggtcaccgaggagaagaccgagaagcgcgtgttgcaggagcgcgagcagcgcggcgagctgtacttcctgcccgaccgcttcgccctcgacgggcagatgcgcaccgagctgcgctaccgtggcatctaccaggcgcgcctgtaccacgtcgacaacaaggttgccggctacttccaggtgcctgcgcactatggcatcgaagaagacctggaggactaccagttcgaaacgccgttcctggcgatgggcatcagcgacatccgcggcatcgagaatgccctgcgcctgtccctcaacggtgccagcgtcgacttcgagccgggtagccgggtcggcttgctcggcagcggtgtgcacgcaccgctgcaaggcgtcgacgggcgccaggcgcagcgcctggagtacgccttcgacctgtcgttgctcggcagcgagcggctggacatcgtgccggtgggccgcgacagccaggtcatcctgaaggccgactggccgcacccgagcttcggcggcgagttcctgcccagcgagcgggagatcaccgcccagggcttcaccgcgcgctggcagaccagcttcttcgccaccaacatggaagaggcgctgcgcagttgcgtggaggagcagcgttgcgacggcttccaggcgcgcgccttcggcgtcggcctggtcgatccggtggaccagtacctgaaggccgaccgcgcgatcaagtacgcgctgctgttcatcaccctgaccttcgccggcttcttcctcttcgaggtgctcaagcgcctggcggtacacccggtccagtacgcgctggtcggcctggcgctggcgttcttctacctgctgctgctgtcgctggccgagcacgtcggcttcgagctggcctacctggtctccgccggagcctgcgtcggcctgatcggcttctacctgtgcttcgtcctgcgcagcgtggcccgagggcttggcttcagcgtcggcctggcagggctgtacggcctgctctacggcttgctgagcgcggaggactacgccttgctgatgggctcgctgctgctgttcgcggtgcttgccgcggtgatggtgctgacccgccgcctggactggtacggggtcggccgcaaggacttcccggcggtacccgccagggcctgacgacgaaggcggcggcgccggccgccgccgatttccaaggaggaaaagcatgcgcctgttcttcgagttcaccctctgtgccgccctcggcctgctggtcagcggcgtgatcctgatctttctgctgttcttcggcaagttcggcctgatcgagtactggatcgccagcggcaagcccctggcccacgccatgctggtgctgatgccggacggattctgggaaggcctcagcggcatcgagggcgccgccggcaatccgcacgtgcgctccttcctggagctttgcatggggctcggacagagcgcgctgttgctgggcctgctgctgttccgcctggtgtgctggaaatgaatggctatgtcggcctgcgcgacgaccgtcgcgacggcgagcgcctggcggcgcggatcggcctgctgttccccggcccctcggcggcctggctgcaacgcgccgagcgcctgcggcggcagcaggcgtcggcgggcctcggggtcaggcgcgggtggcctgcatcgacgggcgctggctgacttcggcgaaccaggcggcgagtcgcgggtagcggccgcgccagtcccactccggctggcgcaggtcgagatagcccagggcgcaggcgacgccgatggcggcgatgtcgaagcgcgcctgcagttcggcgatgcagtcgccctccagccacgccagggaccgcgcgatcttttcccgctgtgcttcgagccaggtgtcccagcgcttctcctcggggcggacgaaggtttcgtagcgggacagcaccgcggcgtcgaggacggcgtccgccagcgaggcgatggtcaggcgtcgccagcgggcgctgccttcgcgggggatcagcggttcgccgacgtgctgctggtcgaagtagtcgcagatcacccggctgtcgtgcagcacctggccgtccggcaggcgcagggcgggaatcttgccggccgggttgctggcgttgagctgccggatgggcgcgaccggcgtcggcgtgacttcctcgagcgccacgcgctcgcgttggccggtttcgtggagcaggaccaggaccttgcgcacgaagggcgaggcggcggcgtagaacagcgtatgggtagcgctcatgcgggctccttggaaggatcagtcgcggacgacgcgcagacgatcggcggcaggctcggcgctccaggtttctccggggcgaccgccgagcagggcgttgccgggcgccggccggtcgctgggcaggacgcggaatgtcgcctgctcactgtcgaaacgcaagagcgccccgctggcggcgtcgtgcagccagacacggtccatggcgtcgacccgcaggctgtccgggcgggcctggctgtccggcagcggccagctctgccacgaggcatcgctgggatcgtagcggtacagccgggcgccaccgctgtcgctggcccagagcctgccgatggagtcggcgccgatcccgcgcaaggccttcgtgccttcaggcgcgggcaaccgctcggcgctgccgtcgagcggatcgacatgcaccagcgcgtcgtcctgcgcgtaccagacctcgccgtccggggtgacgcagatgccgttcgccgccttgtcctggggcgagggccagacctccaccaggcgcctggctgggtcgaggcgaccgtggaagccgcggctgccggtgaaccagaggcccccgtcgtcgtcgaataccgcggactcgagcccggccggcgcggccttggccggtagcgggaaacgttcgctgcccaggcgctcgccgccgatgcgaaggatggcgttgaggccgctgtcgagcacccaggcgttgccgctctcgtcgctgacgatggctcgcggccgcgcgccttcgccgagcggcacctgcacgctctcgccactggtcgggtcgaggcgccccagcgaatgcccgccgtccgcgccgtaccagaccgcaccctgtgcactgggcgcgaccgcgtagggcgcggagcccttgtccagcgggtagtactgttcgccggccagggcggcgccggtcgacgacagggccaggaacaggcccagcagcgggtagggcaggtgacgcatacggttctcccggaacgacgagcggaacgtggaaaggctctgtcttgctattctggcagcgcattgagcataggaggaactgcgaatggccacagtggaaatactcggggcggaatgccgcgcggggggcgcggtgaacgacgatgcgctgggctgcacggcgcaggccgcctgggtgatcgacggtgccaccagcatcggtcgcagcgtgctgggcgtggaaagcgacgcgcgctggctggcccaggcggtggaccggcacctgcggttgctgctggaagttgagcccgagcaatccagcgagaccctgctgcggcgcctgctcaacgatatccagggcgacttccgcgcccagagcggccgcgactggcacgacctcgaagacatgccggcggcctgcctgagcctgctgcggattcgcggcggagaaatcgaactgctcaacatcggcgacagccggatcctcgtcgaaggcgccgacggccaggtgcgtagcttcggcgattcggccctgtacgaactggaccggcaatccctggcgcatttctgccggatgcgcgaagaacatccgcagtgggaccacgccgaactgttcaaggccagccgcccgcgcgtgcggcagaaccgcctgctgatgaacaagcccgagggctactgggcgctggacatcagcgaccgctggctcggccaggtgcagcgcgagaccttgccgctcgccgcgttgcgttccttcgtgctgatgaccgacggcttcgaccggctggtcgagcctttccgccgctataccgacgaacagttgctgcggcgcctcgaggacgtcggagtgagcgccatgctcgacgagttgcgcgagatcgaacagggcgatgaccaggccctggctttcccgcgtttcaagatccacgacgacgccagcgcgctgtggggtcggatcgcggggtgaacgacgatctccggcgcccggaatgcaggtcctccccgatgcgccggctaccgatatcccggccctctcccacaggcgggaggagggcatccggtgcccggaaggtacgttctgcggtagggcggataaccgcgaagcggttatccgccgttgcgcacctgtgacgcgtcgctcaccacttgtagctgacgctgcccaccacgctgcgctggtcgccgtagtagcagtagtagccgtcgcaggacgccaggtagtccttgttgaacagattgttggcattgaccgccacgctgacgcctttcaggctgccgttcaattggcccaggtcgtagcgcacggcggcgtcgtacagggtgtacgagccggcgtagccgtcgtaggtgttggcctggtcgccgtaggtcgagcctacgtagcgggcgccggcacccacgctgaaaccgttcagcgtaccctcgtaccaggtgtagtcggcccatagcgaggcctggttgcgcggcgcctgttgcaggcggttgcctgcgtactggccttttttcacttcggtgtcggtgtagctataggcgccgatcatcttcaggttgtcggtgacgttgctggtggcttccagctctatcccggagaccttcacttcgcccgtctgcgaagtgaccggcgtgccgcctatgttctgcgacacgctgacgttctcctggcgcaggtcatagaccgcggcggtgaacagcgagtcggagcccaccggctggtacttcacaccgatttcccattgcttgccttcggtcggcttcagcgaactggtgctgttcatatcggcgccagtggtgggttggaacgactccgcataggagatgtagggcgccacgccattgtcgaagatgtagctgagcgccgcgttgccgctgaacttcttgtcgcggctggtattggtggcgtcgcccttgttgtagaaggtggccccggtgtgcacccagtcctcgcgaccgccgagggtcaggcgccagttgtcgagggcgatctggtcctggacgtagaggccggtctggtaggtctgctgcttgtagtcgtagtacgcgtcggaacgcggcggcttgggaatcggctggccgtagatcgggttgttgatgttggtcggcggtacattgaagccgaagatcgaggtgtattcgttggtggtccggttgtggtccaggcccagcagcagggtgtggcgcagcgcgccggtgtcgaagtcggcctggaagttgttgtccaccacgaactggctgacgtcctcgtccactgatgtgctggtgcgctgcagggtaccgtcgtcgctggcggcagcgtaatagctggctggggtcagcgcctggaacgacaggtcgttgcgcaggtagcgcaggttctggcggaactgccagacatcgttgatccgccgctcgaaggcgtagcccagccagtagtaggtgcggtcgtagtattcccagtccggatcgccgaggttcttgtgatgggaaaccttgccgaacggcgcgtcgtacttggttccgcgcagcggcaggaactggctggtgatgccggtatcgtcgcggttgaactggccgaggaaggtcagcctggtgtcgtcgtcgatgttccaggtcaggctcggggcgatgttgtagcgcttgtcgtcgatatggtcgacctgggtgttgctgtcgcgcaccacgccggagacgcggtagagaaagcgtccctcgtcgtcgagcgggccggtgctgtcgaagctgacctgcttgtggttgtagttgccgacctcggccttcacctcgtgactggcgacgttctgcggacgcaggctgaccatgtcgagcatgccgcccggcggggtctggccgtagaccgaggaggccgggccgcgcaacagggcgacacgctccaggttccaggtttccagcttcgggttgttgtagacgccgaccgccatcggcaggccgtcgaggaactgggtcggcttgaagccgcgcaccttcaaccagtcggagcgggtgtcgctgccgaagctgctggcgacgacgccgggcatgtagcgcaccgcgtcgtcgaggttgtgcacggcgcggtcggtcatctgctggcgggtcgccaccgagatcgagcgcggggtctcgaggatcggcgtatcggtcttggtgccggtcatgctgcgcttggccacgtagccgctggtcggccccagtgggtcttcctcggcgccgctgaccgtcatcgcctgcagcgacagggtgtcttccggcaccttgcgcaggctgtaggtgccgccggcattttccaccagttccaggccgctgcccttgagcgcttcgcgcaatgcgccgggcgcgtcgaagcgaccttgcacggcgtgggcgctgcgtccttcggcgagcgccgggtccagggtgaggaccaggccggcctgggccgcgatgcggttcagggtgcctgccagcggcccggcggcgatgcggtagtcgcgcacgctggcctgttcggccggggcggcgtggaggaacggtgcgggaacggcgagggcgatggctagggcgagcaggccgggacggaacgtcgggcggggcatgtgcggggctcctggatggaaacgagtctcaatgcctccttgccggacgaatcggaaaaagtgatagggccggcgggaaaaatttttcgccggcccgttcggttcagcgtggcaccacttcgaaccaccaggcgttgtgccttacgctgcgcaccggcaggctcggctccaaagcctgaagggcgaggcgggtgtccttcagcgggaaactgccggtgacgcgcaggtcggcgatgctcgggtcgacccgcagcagcgccggcgaatagcgccccagttccgccaccaggtcggccagccgggcgttctctaccaccagcatgccttgtgcccaggcgccggccagggccggggccgcttcgctggcctgcaggccttgcggcaggatcagcacctgctggccttccttgatcacacgctcttcgctgagcgtttccgcgcgcgcggccaccgccgactgcaacacggtgaggcgcgtgccgggttcctcgcggcgcaccaggaagcgcgtgccgagggcgcgcatgtcgccatcggcgctgctgaccacgaaggggcgcgggtcgccatgggcggtttccaccaggatctcgccgaccagtagcacgacctggcggcgttcgccgtcgaagcggacgtcgatggcgctgcggctgttcaggcgcacatgagtggcatccgggagggtcagctcgcgctgctcgccggtggcgctgtaggcatcggccagcaggtagcggaccgggacgtagcggttggccacgccgagcccgacgcctagcgccagcactagccccagggcgctgccgccgagccggcgcaggcggcgcttgaagcgtgcgttgccggacagcagggcgttgcgcgccggcccgttggcggctctcgccaggtgccggtcgaggccgccgagctgttcccaggcgcgttcgtgttcgggatgcgccgcgtaccagcggtggaaggcgcggtgatcgtcgggatgggcttcgccggagtcgagcagcaattgccaggcgatggcttcgtcgagcacccgcgcgcgtaccggcgaatgacgatcatcggcgctcaccggggctctccgtagagggcgatgtagcactggcgcagaccctgggccaggtattggcgcacgcgcggcaccgagactccgagacgctcggcgatctccgcgtggggcatgccgtccaggcggctatagagaaacgcgctacgcgccttcagcgacagcgtgccaagcaggcgatcgatctcgcggaggtcctcgagaatcaggtactgctcttcggccgaaggctgctccgcttccggaaccagcgccagttcggcgagataggcctgctcaagggcggcgcggcggaagtggtcgatcatcagaccgcgcgccaccttcgccaggaacgcgcgcggttcgcgcaggccgggcagctccgggcggccgaggaggcgaacgaaggtgtcctggctgaggtcttcggcgcgctggcggcagccgaggttgcggttcagccaggcaagcagccagccgcggtggtcccggtacaggctacccacgaattcgctgttgctgacgtcacccgccgacacgaccgctccccatcccgaaacgggattgaatggaaaaacgagaattattcgcaaatgatcgcaaagtgcgactatccctgcaattggcgtccgtcgggaagccacttgagtcgtcccgctggtttgccggaggatcggtgttcccataacaagaacaggagtctcgccgtggccgaacctttgctgatcatcggttcctatctgtccccctatgtgcgcaaggtgctggtgctgctggaactgaaaggcattgcctaccgcatcgaccccatcgtgccgttcttcggcgacgaggccttcgagcgcctcagtccgttgcgccagattccggtgctggtggacggtgacttcgtcctcaacgattccagcgtgatctgccagtacctggaggagcgctacccgcagccgagcctgtatcccgtcgacatcggccagcgcgcccaggcccgctggctggaggagtacgccgattcgcggctgggccaggtgatcatctggcagttgttccaccagttggtgatcaaccgtggcatctggcagcgcgaacccgaccaggcgatcctgcaacgcacctacgacgaagacctgccatcgatctgcaactacctggaagggcgggtcccgccaagcggctggctgtgcggcgagctgtccatcgccgatgtcgccgtcgcctgcctgttccgcaatgcccagttggcgcgctaccaggtcgacggcgagcgctggccgcgcctggcgcgcctgttggctgacgctttcgccctgccggccttccagcatctggcgcgtttcgagaaggccaccgcgcagaccccggtcgccgaacagcgccaggcgctgcgcgaggccggcgcgccgctcagcgcgaccagccacgcccgcgagcggccggtgcgcggtccgatgagccgctgagagggagtgcgggcggcgcccagggcgccgtcctgatgaagcgccattcagcgcctcgataagaccttcgcgacgctggtggatccagcgtccgggcatattttatatagaccagtctatataaagcggaggccgcaccgtgatgaacgtccccgaagggttccagccgctgttccgcagcagtccgttgctcgacctgctcggtcctttcttctgccggcaggacgcccagcgccagttggtggtggcgctgcgcatcgacgaaaagcactgcaaccacggtggcaccgcccacggcggcctgctctcgaccctggccgacgttggcctcggctacgccatggcgttctcccgcgaaccgccgcagccgatggtcaccgtcggcctgcgcctggacttctgcggggtcgcgcgggtcggcgactggctggaggtgcatactcgggtcgacaagctcggccagcgcatggccttcgcctcggcccggctgcacagcggcgagcgcctggtggccagcgccagcggcgtgtttcatctgccctgaggctcgggcatgcttgcccggtcgtctgccgtgagttggggagtcaggtttgccgaagaagtccaatgccgccgaacggatcgtccatgccaccgcctcgctgctggccagccgcgggtatttcggtaccgggctgagcgacatcatcgctcgcgccgaggcgccgaaaggctcgctctatcactatttccccgagggcaagccgcagatcgccagcgccgcgatcggcttcgtcgccgacgaggtggcgtcctttctcgaccgcgccgggacccaggccccccatgcgcgcaacgtcctccgccagttcaccgcgaccctgcgtggctggctggagcattcgcgtttcgaagaggcctgcccggtgctttccaccagcctgagcatcgacgccgagctggccccggtgcacgctgaatgccgccgggcgctccgcgcctggcacgccagcatcgagcgtgcgttgcgcgccgacggactggcggaaaagctcgccgcctcgcgcgcctggctgatcctcgcggcgctggagggggcggtcgcggtggcccgcgtcgagcggtcgttccaggcgctggatgcgatcgaggaagaattgcaggcgctactgccggcctaggcgggtgtcgcgcccaggccggccaggtatccgtcagtgctgcacgctgtccaccgcgatcgcttcgccggaaacttcgcggtaggccgtgcggcgcttggccagggcgtagtggatcaggccggccaggccggcgccgaagaaccaggagaacggcgatagctcggcgaatgccggcaacaatgccagcagggtggagatgatcgccgccgggacgaacgcggcgatggcccgcgggttcacccctcgcgcgtagtgataggcgccggcgcggctttcggtgtacagctccggcaggttcacccggcctttccgcaccaggtagtagtcgaccatgatgaccccgtacagcgggccgagcagcgcgccgaggccgccgaggaagtagaggatcaccccggggctgttgtacaggtgccagggcaggatcagcactgcgatggtcgcgctgatcagcccggcgcggcggaagttcagcaggttcggcgccaggttggtgagtacgtaggccggggcgacgaagttggccatgatgttcaccgccacggtgacgatcagcagcgccaggctggccagcaccaggaagagggtgtcggggatcgcggcgacgatgtcggtggggctctggatgagctggccgtcgatcctgaactgggcgccggcgaggaccaccgcgaacaggccgaacagcaggatgttcaccggcagcccccagaagttgccgacgctgatggtgcggcggtccgggcagccgcgggcgaagtcgcagaagttcaggatcatggtgccgtacagggtcacccagaacgccgcgccgccgaagatcttcaaccacatctgcgaaccgctcatgggttcgccgctggaccaggcgatggaggcgccggcgcgcaggtacatccaggcggcgagggcggcgacggtgagcaggatcaccggtccggcgaaggattcgtagcgacgcaccatctccatgccgtacgcgaagatcagcagttgcacgcaccagatggcgacgaaggtcgcccagcccaggctcgacaggccgaggatggcgtcctggtcgtaggctgcgagccccggccagatcgccgtcagcagcacgcgcaggacgatggaggcgagataggtctggatgccgaaccaggcgatggcgatcactgcgcggatcagcgcggggagttgcgcgccgtggatgccgaaggcgatgcggcacatcaccgggtagggcagcccggtcttctggcccatgtagccggacaggttcatcagcccgtagaccatcagcgcgcccagggccagcgcggcgaggatctgcgcgccgctcatgccgagggcgaagaggccgatggcgaaggagtagttggcgatattgtgcacgtcgttggtccacagcgcgaacaggctgtagcgtccccagcggcgcccttcggccttggtcggggcgagatcggcgctgtacaggcgcgggctcagcggcggcagttcggggccggcgtgatggctggcgcggggcaggcaatcgagactggcgggagtgcccaggtccaggcgcgccgccgagaactccgctgcgcgcagcccggcgcgtggcaggcagtcgagactggccggagtgcccaggtcgagcagtgaggcggagaactcggcgctccgctgaccggcgcgcggcaggctgtcgaggctttccagggtgccgaggtcgagcagcgagggagaaaactcgcggggcgaggcgggcggcttcggggtgctggacatggcggtctcctccggcagtcggaagaactcggcgcgaggtcgggttcgtctgttgtttttgtatacaagaatttcgaagatttaagccagttatgtgccaaccgatcctcgaccgaattttccgcgctctgcggaaaccggcctttcggcggcaagcccctgaaaccgcttgggaaaaagctgtcgcttcgatcaggtaagaatttcgaaccgattcataggcttatgcggacggacgagggagaggggaaaaagcgggacgccaggaggccgcattgggaaaattgtgcacaataattgtgcccagtgttaccgccgcgcccgtcgacggtgcgcggcgcgaagctcagcccgtccgggaaatatccaggcccttcaactgcccgatcatccacgcatgggcgtcacgcccgacatgctggacgtggctgtagatccgcagcacgtagggcggaatgtcgaacggcgcgggatacagggcgaggccggcggcttccgccagggcccgtgcggcatgtcgcggagcggtgagcaggaaatcggtggagcctgccaggaacagcgccgccagcaccgtcggcagttgcaccgccacttcgcgacgcaagccggagcgggccagcagccggtcgatcaccccgctgtcctcgttccacggcgtcaccaccgcatgccgttcggccaggtagccctccagcgtcggcgccccggcgaggcgtgggtggtcgcgccgcgctaccaccacgtagcggtcggcgaaccagtcatgggcctggatgccttcgggcaggcgctcgtgttcctcgtcgtagccgagggcgaaatcgatccgcccgctggccagggcctccaccgacagcttgcgttccgcattgaccaggcgcaggcgcactccgggcgcgctgtgctgcaggcggttcatcagcggcggaagcagggcgaaggcggtgtagtcggtggcggcgaagacgaaggtgcgctggctctgtcccggtacgaacggccgccactcttccagcccctcgccgagggcgcgcagagcggcggccaccgcagcggccaggtgctcggcacgctgggtcggctgcatgcggttgccctggcgcaggaacagctcgtcgtccagcccctggcgcaggcgccccagcgcatggctgaaggccgaggcgctgatcgccagttcgctggctgcggtgccgacgttgcggtggcgatacagggcgtcgaagacaagcaggaggttgagatcgaggcggcgcagcaggggatgcatgttattcagttgccgatgagaagaatgcacttcatgcatcttagcagtcgcactaggatggccggatcccccaccggaaggttgcccatgactctcgaaatccgtcccgccgtaccggccgacgccgaacagatccttgccttcatcatcgaactggccgactacgagcgcgcccgccatgaggtggtcaccgatgtcgaaggcatccgccgcagcctgttcgccgaaggctcgccgacccgcgcgctgatgtgcctgagcgaaggccggccgatcggctatgcggtgtatttctacagctactcgacctggctggggcgcaacggcatctacctcgaagacctctacgtcacccctgagtaccgtggcgtcggcgccggtcgccggctgctccgcgagctggcccgcgaggccgtggccaacgactgcggacgcctggagtggagcgtgctggactggaaccagccggccatcgacttctaccgctccatcggcgcgctgccgcaggacgagtgggtgcgctaccggctggatggcgaggcgttgcgcaagatggcggagtagctggcggcaagccggcgttgatgccgggggagtgcgtgggggtagggcgaatagcgcctggcgatatccgccagtttctcaccgaggacgcctggcgcctgccgagtcatcgccaccggtatccatgccgctctcccgtagcgctgtagcgttgtcccgcaggaacgcccacaggcgttccgctaccgggccctgcgcgcgatcgcgccggcgcgccgccaccacctcttcgctgcgtcctggcagatgcggcccggccagagcgagcaggcggccgtcggccagttcctcgtcgaccaggaagtccggcaggtgcccccagccgaggccctggaggatcacctctttcttcgttcgctggtccggcacgctgcactgtcgcgcgccggcgagcatgaaatagtccgtcggcggagaatggcgggcgctgtcgcgcatcacgcactgggcgaaggggcgcagttgttccgggcgcaccggtcgcggcggaggatcgccgagcaggcccggcgcgatgaccgggaccagcccgaccctgcacaggtcgagccattccaggcgtgggtcggacttgtccacgcgatgcaggatcaggtcggcctcgccgtccagcaggcgctccagcgggccgctgacggtttcgaacagcaattgcaggcgggtctgcggctggctgccgaagaaccctgcgagcagcgccagggccgggcgcggcgggcagaggtcgcccagtaccacgcgcagctcgctttcctcgccctgggccaggtgcgcggcgtggccacgcagcccttccagttcgtagagcagggcctgggcacgctggtggaaggagcgaccggcggcggtcaggccgacccggtagccgccccgttccagcagcaccaggccgagctggcgctccagccgggcaacggcggcgaacaccgccggatgggagcggtgcaggcgctgtgcggcggcctggaagccgccggcgtcgaccaccgcgtcgaagcattggaggtcgtggagggtgaagtcgtgcatgtcagcttccctgacagagtcgttccattctttgtagtttttcccagggaccgtcgcaactagcctggcgtgcatggcaatcaccctgaccccggaggctcccatgggcaacctgtcttttctcgctaccagcgacggcgccagcctcgcctatcgcctggacggtgcggcagagaaaccgctgctggcgctctccaactccatcggcaccaccctgcacatgtgggatgcgcaactcccggcactgacccggcacttccgcgtcctgcgctacgacgcccgcggccatggcgcctccagcgtgccgccggggccctacaccctggcccggctgggcgaggacgtactggagctgctcgacgcgctggaggtacggcgcgcgcatttcctcggcctgtccctgggcgggatcgtcggccagtggctggcgctgcatgcgccgcagcggatcgagcggctggtgctggccaacacctcggcctggctcggcccggcggcgcagtgggacgagcgcatcgccgcggtgctgcaggccgaggacatgagcgagaccgccgcgggtttcctcggcaactggtttccgccggcgctgctggagcgcgccgagcccgtcgtcgagcgcttccgggcgatgctcatggccaccaaccggcacggcctggccggctccttcgcggcggtgcgcgataccgacctgcgcgcgcaactggcgcggatcgagcggccgaccctggtgatcgcaggggcgtacgacacggtcaccgccgccagccacggcgagctgatcgccgcgtcgattgccggggccaggctggttacgctgccggcggtgcacctgtcgaacgtcgagttcccgcaggcgttcgaaggcgcggtgctgagctttctcggcgcagactgattaggctatcgtcgcggcttttccctcggcgcaggagccgacatgaacgagccgggcagtttcatctggacgtggtacgggcaggatgagcatcgatgggtcctgctcagcgcagaggcgttcctggcgctcgatttcctggcccttgacggtgccatgcagagagagaccatcggcagttgcccgggctgctctacctggtcggagaaggtcgtgccgttgcacgagtggctcgaaggctgtccgggtcaccaggccgggagttttcgcgatgccttgaggcgtgtctgggcgctgtgcaacgagctgcccgaggaagcgctgggctgcttcgacttcgacatctatgcccaccccggatggcaggcggtacgtcgagaggcccgagaggcgctgcggcagaacggttgggacagcatccgtagccacgccgaggagctgcgcgacgactgttgggagcgtgtgcatggctacccgaagaaatgaaaaagccgcccctcggggcggcttttcgttgcgctgcggcgaacggcctacagcccgttcttcgccttgaactcacggcggcggcgatgcaggaccggctcggtatagccgttcggctgccgggtgccttccaccaccagctccagggcggcctggaacgcgacgttgtcgtcgaagttcggcgccatcggccggtaggacgggtcgctggcgttctgccggtcgaccaccacggccatgcgcttgaggctctcgaccacctgctcctggctgatcacgccgtgacgcagccagttggccagcagctggctggagatgcgcagggtggcgcggtcttccatcagaccgacgtcgttgatgtccggcaccttggagcagccgacgccctggtcgatccagcggacgacatagccgaggatgccctgggcgttgttgtccacctcgttcttgatctcttccgcggtccagttggtgttcggcgccagcggaatggtcaggatgtcgtccaccgaggccggggtgcgcttggccagctcggcctggcgggcgaacacgtcgaccttgtggtaatgcagggcgtgcagggtcgcggcggtcggcgacgggacccaggcggtgttggcgccggccagcggatggccgatcttctgctcgagcatggcggccatcaggtcgggcatggcccacatgcccttgccgatctgcgccttgccttgcaggccggtggccaggccgacgtcgacgttgttgttctcgtaggcgccgatccacttctccgacttcatggcgcccttgcgcaccacggcgccggcttccatggaggtgtggatctcgtcgccggtgcggtcgaggaagccggtgttgatgaacaccacgcgatccttggccgccttgatgcaggccttcaggttcacggtggtgcggcgctcctcgtccatgatgccgaccttcagggtgttgcgcggcaggccgaggacgtcctcgacgcggccgaacagctcgttggtgaaggcggcttcttccggaccgtgcatcttcggcttgacgatatacacgctgccggtgcggctgttcttgcggctggtgttgccgttcaggtcatgaatggcgatcaggctggtgaacagaccgtcctggatgccttccggcacttcgttgccgtccttgtcgaggatcgcatcgttggtcatcaagtggccgacgttgcgcacgaacagcagcgagcggccgtgcagggtcagttcggaaccgtcggccctggtgtagacgcggtccgggttcatggtgcgggtgaaggtgctgccgcccttgctgacttcctcggccaggtcgcctttcatcaggcccagccagttgcggtagatcactaccttgtcgtcggcgtcgaccgcggcgaccgagtcctcgcagtccatgatggtggtgagggcggcttccatcagcacgtccttcacgcctgcggcatcggtctggccgaccgggctgctcgggtcgatctggatttcgaagtgcaggccgttgtgcttgagcagtaccgcttgcggcttggcggcgtcgccctggaaggcaaggaactggccagcgttcttcaggccggtttcgctgccgttcttcagcgcgacgaccagcgcgccgttcttcacgctgtaggaagtggcgtcgacatgggagccggactccagcggcgcggcctcgtcgaggaaggcgcgagcgaaggcgatgaccttgtcgccgcgaaccttgttgtagcccttgcctttctcggcgccgccttcttcgctgatcacgtcggtgccgtagagtgcgtcgtacagcgagccccagcgggcgttggaggcgttcagggcgaagcgcgcattcatcaccggcaccaccagctgcgggccggccatgcgggcgatctcgtcgtcgacgttctgggtgccggcctggaagtcttccgcctcgggcagcaggtagccgatttcctcgaggaaggccttgtaggcaactgcgtcgtgggcctggccggcgcgagcctggtgccagccgtcgatcttggcctggagttcgtcgcgcttggcgagcagggctttattcttcggcgccaggtcgttgatcacggcctccgcaccggtccagaacgtgtcggcagagacgccggttccggggatggcttcgttgttcacgaagtcgaacaggactttggcgacctgcaggccaccgacttgaacgcgttcagtcattgtttgcctcactctgctctagaccagctctggacccgggccgcacggccttgtagtccgagccgcggcatactacatgatgccgcgggaaaaatcagtggttacgcgtcgcgttacgactggatgacgcttcacggtcacgttggccaggctcaatgttcgcaaaaaaactgtactttgttccagataaatctaaaaacagtacacgatttatcgcgagcccaactgcggcgcggcgtcgcaggatgtttcactgcgctgcgagcgccttgcctatactcccggaatcgccccaggagcctcgccatgcccgtctatgccgcatccctcgccgatctcgccgacctggttccgctgttttccgcctacctcgacttctacgaagtgccggcgccggaagagcaggttcgcgcattcctcgccgagcgcctgcgccagggcgattcgaccctgttcctggccagggatgccgaggcgcgggcgctgggcttcgtccaactctatccgctgttcgcctccctggcgctacgaccttcgtggctgctcagcgatctctacgtccgcccggaggcgcgtcgccggggtgtcggcgaggccctgatgaaccaggcccggggtttcgccgaaagcatgggcgcctgcggcctgcaactggagacggcgaagaccaaccacgccgggcagtcgctctacgagcgcctcggctatgtccgtgacgaacagttctacacttactggctgcagctctgaactcccattcgtcccagcaggaggcaagctcatggatcacctggtcctgaccgtgatcgccaccgaccatcccggcctggtcgagcgcatcgcccaatgcatcgcctcccacggcggcaactggctggaaagccgcatgtcgcggatggccgggcagttcgccgggatactgcgggtggccgtgccggcggaaggctacgacgaactggtggaagggctacagggcctgtccagccacggtatccgcgtgctcctggcggaaagcgggatcgagccggtatgcaactggaagcctatccacctcgacctggtgggcaacgaccgccccggtatcgtgcgtgacatcacccggctgctggccgagcacggggtgaacctggagagcctgtccaccgaagtgcgcccggcgccgatgagcagcgaaccgctgttccatgccgatgcgctgctggcggtgccgctgaccctgtcgctggacaccctgcgcgagcgactggaagacctggccgacgacctgatggtggagttggtgctggacgcgtcctgaagttgttcaggaaagccggggacgggcctgtggaaaagccttgggtgaaaccctgaagcccaggcgccgcgaggcttggaggtcgtagcgcgttttttgaccagctacgttgcggttattcccaaaccaggtggaccagcctgtgggtattctgtgtggataaccttgcaggcctttatccatgggcgatacaagggtttgctcgttttctgagcagcctctcttgcgctttttcttgtggattaaccttcgccgcagtcattgcccctgtgcacaaataacgtggagcagtctgtgggtaagccggggaagaatccatgcaggcctttatccatcggcactccaagtatccgtacgttttttgatcgatggctcttccggttcatccacagttgctcacaaaagccttgggcagctttgtggataagccttgtgtatatcgctgtaacccttggtgagcctggcatacagcggtatgctcaaagactgaacaggcgctttgcagggcctcttccgaccagttatccacgcgcctgcggggaggagaaggcaggtctatgcacaaagtacgtgcatgaacctgtggaaaagcctggggtggatcgctgagcgtcagtattgacaggggctaggaaggagtgcgcgttttttcgccaggcttgcggagttccgcaagcctggggataacgtcagcccggttgcggcaggcggcgcaggctgcgccaggcgtcgaagctgtagacggccagggcgagccagatgaaagcgaaggcggtcaggcggctggagtccaggtgctcgccgaacagcaggatcgcctgtagcaggaccagcgtcggtgccaggtattgcaggaagcccagagtggcgtagggcaggtgccttgccgcagcgttgaagcagaccagcggaaccagcgtcaccgggcccgcggcgaccacccacagggcttccggggtgctccagaaagccgtttcgctggtcggcccgtcggcgaaaaacagcaaccagaccagcgccagcggcagcagcagccaggtttccaccaccagtccgggcagcgcggcgaccggcgcctttttgcggatcaggccgtagaagccgaaggtcagggccagcaccagcgacacccagggcaggctgccgagttgccagacctgctgcgccacgcccagcgaagccagggccaccgccagccattgcaggggacgcaggcgttccttgagcagcaacatgccgagcatcacgttgatcagcggattgatgtagtagcccaggctggcttccagcatgtggccgttgttcaccgcccagacataggtcatccagttgctggcgatcagcagtccgctggcggccagcacgacgaagcgctgcggattctggcgcagctcgcgccaccagcccgggtgtttccagaacagcagcaggacggcgccgaacagggccgaccagaccgcgcgctggacgatgatttccaccgcgggaatgcgttcgagcagtttgaagtagagcgggaacagcccccagatcacataagccgtcaggccgaggacatagccccgacggaggttggcggtcgccatggagaatccttgaaacgtcaggcaggtaagaatggccgtgcacggcatgcacgcgcggatgacctgtgaattctagtagggggtgacggggttgtctgcgcacagttcccgcggaaaagcaccggcacacttgccgttccctcgcctgccccgaggcgggacggatagcgccgcgcgccattcgccctgtccgcaggaggctcagaacagccgcagcggttcctcgtccagcgccgccagttgttcgcgcagcaccagcacctgctcgccccagtaacgttcgctgccgaaccaggggaagctcggcgggaacgccgggtcgtcccagcgccgcgcgagccaggcgctgtagtgcatcaggcggaggctgcgcaggccttcgagcagcggtagctggcgcgggtcgaagtcgtggaactcgttgtagccgtcgaccagttcggcaatctgcgccaggcgttcgtggcgctcgccggcgagcatcatccacaggtcctggagggccgggcccatgcggcagtcgtcgagatcgaccatgtggtagacatcgtcgcggcacagcaggttgcctggatggcagtcgccgtgcaggcggatcggctggtagggcacctcggcgaacagggcgtcgaggcgtttcagcaggtcgcgggcgaccgactcgtaggccggcagcaggctcctggggatgaaattgccttccagcagggtggccagcgaggcgtggccgaagttatccacagcgagcgcctcgcggtgctcgaacggccgcgtggcgccgaccgcgtgcaggcggccgagcaactggccgaggcggtagagctggtcgagattgcccggctcgggcgcgcgcccgccgcgccgggggaacagggcgaagcggaagccggagaatgcgaacaggctttcgccgtcgcgcgacagcggcgccaccaccggcacctcgcattccgccagctcggcggagaaggcgtgctcctcgcggatcgccgcgtcgctccagcggtccggtcggtagaacttggcgatcagcggctcgccgtcctcgatgccgacctggtacacgcggttttcgtagctgttgagcgccagcacccgtgcgtcgctgagatagccgaggctttccacggcatccaggacgaggtcgggggtcagttggtcgaagggatgggacatgacggggcatccaaggctcgaaagacccctagtgtacgcaagccggcgcgggccggcaggttcacagcggcgtgccgagcaggacctgggccggatcgaaggaggcgatcaccttctgacccttcttcagccccaggctggccaggcgttcgccggacaacagcgcgcagagggtaagaccgctgcccagggcgatgcgcacctcgctgggaccggccttggccgcgaggatttcctccagggtgccgtgcaactggttcggctggtcctcgcgcggttccagcccgacgtccagccagccggccttgatcagcgccagtaccgggcggccgcgaccgagttcgagttgctcggtgctggcgcgggtgatcagcgcctcgatgcgttgctggcctggcagctcgatggcgatgcggtcgtggaagccttcgccatggatcgacaggacccgcccgtgcaattggttgcgtgcgctggtgcggagcatcaggcggccgatcaggttgaggtcctcggcgtcttccgcggcctgcaacacctgcgcttgcaaggcttccaggcgccggtagagagccagcaggcgttcgccctcggcggtcagccgggcgccgccgccgcccttgccgccgacgctacgctcgaccagcggacgctcggccaggttgttcagttcgtcgatggcgtcccaggcgcccttgtagctgatgcccacggccttcgccgcacgggtgatggagcccagttcggcgatctgcgcgagcagggcgatgcgttgcgggcgacgggtgacgtgctgggcgagagtggagagtgcggacatggaggcttcgctatgagcggacgtatacggcgaaggctccaacagccatgggcaaaacgcaagggcgtcactcggcggcctggtagagaccgtagccggcggcggcgccggccaggtcccaggcgaggtccttccagctccagccgctgccggcggaacggctgtcgtagaactccttgccgacgccgaaggcgagcgagaagctcaggccgaagcgtgcctggcgagcgccgcgcaggccgcggtcgtgagccatctgcatgcccgccgcggcaagggccgcggaactggcgaaatgcagggctttgtcttcgcccagccagtcgtcttcggcgaaatggctgcaaccgccgagcaacaggcaggccgcgaccagcagtgcgcgcatggatcctctcccgtatcggttgcgcggcagtttagcccagctcagccgggcttcggcgtgcgcgccaggcagtagacgtcgacccgcgcggcgcccgcccggcgcaacaggcgggaaaggcgctcggcggtggccccggtggtgagcacgtcgtccaccagtgccaggtgcagcccgcgaacatcgctggcgggcgccagggcgaaggcgtggcgcaggttgcgccgccgcaccgtcgcgtccagtccctgctgggccggagtatccagcactcgccgcaggctgtgcggatcgcagcgcaggtccagctcgccagccagtcgctcggcgagctgttgcgcctggttgaagccgcgacgacgttcgcgccgtggcgccagcgggaccggcagcaggcgtgccgggcgcggcaggccttcggcgtagcgttgccgcaggtgttccgccagcaactcgccgagcagccgccccagcggccaggccgcctggtgcttgaagcggttgatcaggctgtcgagcggaaaggcgtagcgccagggcgcgatcgcctgttcataggccggcgggcggcgcaggcactcgccgcacacctggccgtccagcggcaggggcagggcgcagcgccggcactgctggcgcgaccagggcaggtcggcggcacaggcgcggcacagtgggcggggcggctggtcgctgcgggcggcgcagagcaggcaggccggcggcggcaaaagccagcgagtgagaggacgaagcgggaacgacatggcgggatttcctggcggatgtcgcaccatgcaaccgcaggcgcgcgccgccgaccagccgttgccagcgggttcggaactcgcctgtggataaccgaaaccttccttcgctccttgcggaaacggccgacgcgtggatcagtggatgagccagctcatgacgatcaggccgagcaccgtccagatcaccccgccgactatcgagcggcgcatgaaggcgcgtataccgctgtagagcagcaacaggccgagcaccaggaagacgaagctgaacagcgatgcgtccatgccgatggccctggccaggccgtggaggaagtcgtccatggcgtcccagatgccgcccagcaggccggagagcaggtccaccacgaagcggatcgccctgcccagcatctcgcccagtccgtcgaaaaagccttctgtacccatgagtgtcctgtcctgagtgttcccagcgttggatcagagattagccgccgggttcagcgccggctgctgctttgctgcggagcgaggaacgactggcggaagtattcgcggaacgcgcgcatcccggcgctcgcttcggtgtcgcggcgccaggccaggccgacgctcatcgacggcaccgggtcgaccagcgatagcgtctcgatgcgtttgccttccagcgaccagggccggtacaccaggtcggagaggatggccacgccggagccgttggcgaccatgctgcgcaccgcttccaccgaactggtatggaggatcacctgtggccggtggccgctctgttgccagtagcgcagcgcgctctgcccggcctcgtcgacggtgagcatgatgtagggctcgccggccacgtcggcaaggcccaggtcggccttctcgcccagcggatggcggctgggcagccacaaccggcgctcggagttgaacagggtttcggcggcgatcccgggctcggtgagattgccggtgagcagcacggcgatgtcgtagcgaccgtcgaggaggccgcgctcgatgctggcgcgctcgtcctcgaacagttgcagctccagttccgggtaccactgcgccaggcgttgcaggtggtgggggaggaaatagcccatcacggtatagctggcggcgaccttcagggtgccttcgacccgggtgtccggttgcgggctgttgagcgcgtcgtcgacgctgcgctggatcgaataggcgtggttgaggaagtgccggccgctgtcggtcaggttcatgccctgggccgtgcgggtgaacagggcgacgccgagcatgccctccagttcctggatcgcgctggtcaccgccgactgcgagatgttcaggtggatggcggcctgggatatctggccgaactcggcggtggcgatgaagtagcgaacctggcggagggtcagggccatggggagcatccggaggaggtatctgtttttcagaaaccagtctatcgaataataaatctacccaataccttttccggcttttaccgtggctccatccaacaacaagacagatgaggcctgcgggcaatgactgaagtcgacctcaattccgacatgggcgaaggcttcggcccatggaccatcggcgatggcgtggacgcggcgatcatgccgctgatcagcagcgccaacatcgccaccggtttccatgccggcgacccgagcagcatgcgccgcaccgtggagatggccgccgagcatggcgtggccatcggcgcccatccgggcttccgcgacctggtcggcttcgggcgtcggcacatcgccgcgccggccatcgagctggtcaacgacatgctctaccagcttggcgcactgcgcgaattcgcccggctgcagggcctgtcgctgcaacacgtcaagccccacggtgcgctctacatgcacctggcgcgggacgaggtcgccgcgcgcctgttcgtcgagaccctgcaacgcctggaaccggaactgctgctctattgcatgcccggttcggccacctggcgcatcggccgggaactgggccagccgctggtgcgcgagttctacgccgaccgcgactacgaccgcagcggctccatcgtcttcacccggcgggtcgccgccctcgatccgcagcaggtcgccgacaaggtcctgcgcgcctgccgcgagggcaaggtgcgcaccgtcgagggcgaggacctcgacatcgccttcgactcggtgtgcatccacagcgatacccccggtgccctggagctggtcgccagcacccgtgcgcgcctggagggcgccggcatccgcatcaaggcgccgcgttgagcgccgctcgcctcggcgagcctcgcgacaagcttttctgccatttcctacaacgttcgaataatgaggattcgtcatggccgaacataacgtgcagtcccccttgcccggcaccttctatcgcaaggccagccccgacgcgccgccctacgcggaggtcgggcaggcggtcgaggccggcagcgtgatcgggctgatcgaggtgatgaagcagttttccgaagtgcaggccgggcaggccggcatactccaggcgttccacgtggaagatggcgaggccatcgagccgggccaggtgctggcggtgatcgccagcgctacctgaggaggatgccatgcacaagcgactgaacaagctgctggtggccaatcgcggcgagatcgccgtgcgcatcatccgcgccgcgcaggcactgggcattcccacggtagcggtgtgcagcgaggcggatcgcgattcgctggccgcgcggctggccgatgaggtacgcctgatcggccctgcgcgggccgaccggagctacctggatatcgaggcgattctcatggcggcgcgggaaaccggtgccgactcgatccatcccggctacggtttcctctccgagaaccccgccttcgccgaagcggtgcaggcggccggcctggtcttcgtcggtccggaggcgcagaccatccgccgcatgggcgacaaggccgaggcgcggcgtaccgcgatggccgccggggtgccggtggtgccgggctcgcccggcgagctgggcgacctcgacgcggcgctggcttgcgccgaagaggtcggctatccgctgctggtcaaggcctccgccggcggcggcgggcgtggcatccgtatcgcccacgacgccgacgaactgcgtcgggaattccccatcgcccagcgcgaggcgcaggccgccttcggttcgccggcggtgtacttggagcgcttcatccgccaggcacggcacatcgaagtgcagatcctcggcgatggcgagcgcgcggtgcatctgttcgaacgcgaatgctcgctgcagcggcggcgccagaaggtcttcgaggaggcaccttcggcggcgctggacggcgcgcagcgccaggccctctgcgagagcgcggtgcgcctggcgcagagtctcggctatcgtggcgcgggcaccctggaatacctgttcgacgcgcacagcggcgagttcttcttcatcgagatgaacgcccgtatccaggtcgagcatccggtcagcgagatggtcaccggcatcgacctggtccaggccatgctgcgcatcgccgccggcgaggcgctgccctggcgccaggaggacattcgcctgaacggcgcggcgctggagatgcggatcaacgccgaagacccggcgcgcaatttcttccccagccccggcaccgtggagcgcctggaatggccgcagggcgagggcgtgcgagtggacagccacctgtatcccggctaccgggtgccgccgtactacgattcgttgctggccaagctgatcgtccatggtcgcgaccgcgacgaagcgttcgcccgcgcgcgccaggcgctggagcgcaccgtgctggccggcatggccactaccctgccgctgcaccgctggctgctcgccgatgcgcgggtacaggccgcgcagttcgataccgctaccctggaaacctggctcgccgagcggaccgccgccgcgcaggaggtttgagatgcatgccaacatccgctacagcttcggcggcgacgagcacctgttcgccgaggtcgccgagtccatgtcgctggaagccttcttccgcggcatggcgatcacccgcgccatcgagacactgcaattgcccggggtgctcgacgtatgcctggccaacgcctcgttccaggtccgcttcgaccccgaccggctggccccgcaggcgctgctggagacggtgcgcggcctggaggtcgaggcggtcgccgcgcgcagcatcgagacgcgtatcgtcgaagtgccggtgttgtacaacgatccctggacccacgagaccctgatgcgcttccgcgaccggcaccaggacccggactccaccgacctcgagtacgctgcgcggatcaacggctacgccgacgtgcaggcgttcatccaggcgcacagcggcacgccgtggttcgtctcgatggtcggtttcgtcgccggcctgccgttcatgtaccagatggtcgagcgcgagcggcagttgcaggtgcccaagtacctgcgtccgcgcatcgacacgccgaagctgaccctcggccacggcggttgcttcggctgcatctattcggtgcgcggtgccggcggctatcagatgttcggcgtgactccggcgccgatcttcgatccccgccagggcctgccctatctcgaggaatcgatggtgttcttccgcgctggcgacatcgtccagttccgccccatcgagcggaccgagtacgagcgcatggcggccgaagtcgaagcgggcacattcgacctgcgcatccgtccggtgagtttcgatctcgacgcgttccttgccgatccgcgaggctgcacgcaacatctgcaggaggtgctgtatgtcgattaaggtgctcaagcccggcctcgccacctcggtgcaggacgccggccgcgaaggccactatcacctgggcatcccgccgtccggcgcgctcgaccagtatgccctgcgcgctgccaacttgctggtgggcaacgcaccgaccgccgccgtgttggagtgcgcgctgctggggccgcagctggagttccagcgcgacgccttggtggccgtgtgcggggcgcgcatgacgcctcgcctggagggcgcggagatgccgctggatacttccttccgggttcgcgccggccaggtcctggggttcgatttcattcgtgccggcgcccgtggctatctcgccatcgacggcggcatcgcggtacccgaggtgctgggcagtcgttcgacctacggtctgggggcgatcggtggcttgcagggacgacggctggcggagggcgacctgctgcctctggggcctgcctcgccctctgccgtggagggcttggcgctgccgcgttcgctgcaggtggaggtcggcggcgaggtgagcttgcgggtggttcccggactctacgtccatcgcctgacccccgacgcggtcgagcgtttcttcgccgagacctggaccgtcggttcggaggcggaccgcaccggctaccgcttcaagggcggcacggcgctccggttcgagccgcgcgaacagccattcggcgcgggctcggacccgtccaacatcgtcgacgcctgctatcccatcggctcgatccaggtaccgggcgggctcgaacccatcgtcctgcatcgtgatgcggtgtccggtgggggatatgccacgctgggcacggtgatcagccccgacctgaaccggctggcgcagatgcaaccgaaccagaaggggcgtttcgtcgccgtcagcctggaggaaggtctcgaggcgcgtcgccgttacaactggcaagtgcaacgactccagcacttcttcctgcgctgagtcgtcgataccgggccgcttcggtctgcgaagcggccccgggcggtcacttgtagtagacctctatcgcggcggtggcgttgaaggggcctggcgttggagtgcccgtcatccacctcacctgggcgaggaagtttcttatgaccaccaattggttctggctattgggcaccagtacgaactccttgccgatatcgatgatgctgcggtcttcctgcttgagaagtcggattcccacggacttgttgttgttatccaaaagagtgtccgaaccccacagggaggtgctgccggaggggaggaacatcgcgttcaggccataggcgctgctgcagttcttattggcggtgacgctgaacggaagttccttgaggatctggtcccggctggcgaaataggcctgcaggctttggaagtcgacggttttcggagaaaggctgattgtggacgcgcaggcgacgtagcgaaggttattcaagccgtggagggtcatgcggaagttgtacccccctatgttattgatagcgctctcgccatcgaactggaaaatcgggtaggcgtttacccctgtgataggaccttccttaccggtactgggacctgcccgcttggagagaaagaagttgaagttgacggtcatcttcttcgccctgccttcgcaacctcgtcccgtccagcaaccatcgaagtgcatgccgatctcctttcggcacttgtcgagtgtcgagcagcgcaggtcttcgccgttcaggttgatgcccacctccaggtccgaacccagcgcgccctgaccggttggactcaggtagaaatagacctgctctggcccccagtcgcgatcctggaagcaagtgatcgatatggagtagttcggagaccgccagagtacggtgtccttggggaggaccgatggaacagcgatgctcgtatcgatgtagacataatcttcggtttgcttgttgtccgatttccagcacatcaaggcgaagcttttctgcgacaggacgagcagcattgcgacaagcatgtaacggatgaaggcattcatggggttcttctgcaggttgttaatcgattcttgtttttgcagagcatgccgcgcctgttgcaggtgcggcctagcggtcacttgtaatagacctctatcgcggcggtggcgttgaacgggcctagaatgggtctgctcgtcatccacctcagttgggcgagaaagttcttcgtcaccgtcgtctgggttggggcgtagggaatgaactcgaactccttaccgatactgatgacgctgcgatcctcattgaggagcctgatgcccactgttggattgtccttggccagcaacgtatccgtgctcgacagggtggtattgctggcgggaatgaacatagcgttcaggccataggcgctgttgcagctcttattggcggtgatgctgaagggaagttctttgatgaccagattctgtgcggcaaattgcgattgcagtatctggaagttgagggtttttggagaaatgcttagcgtggaggtgcaggcgacgtagcggaggttgttcatgccaagggcatacatacgtaggttccggccccccaggttgttgatgcctcccactccatcgaactggaacagtgcgtaggagtttacgcccgtgatgggaccttccttgccgggagtgggggcggcgagtttggagaggaagatctggaaacggacctgcttggtctgagccatgccttcgcatcccccccgtcctcctgtccagcaaccatcgaaatgcatgcctatcttctgccggcagccggggagcgaggaacaacggaggtcctcgccgttcaggttgatgcccacctccaggtccgagcccaatgcgccctggccgtccggactgagatagaaatagacgtcctcaggtccggtgttttcgcgctcctggtaacacctgacggagaaatcgtaggttggagagcgccagagcacggtgtccttgggcagagccgaaggcacggcgatgctcgtgtcgatgttgacatagtcgatcgttgccttgttgtccgctctttcgcaggtcagcgcataacctttctgcgccaacgcaaccagcattcccacaagtagtgttcgggtaattgcattcatggtgtattccgggcctcatgggtgtttggcgttggtctctacgcctgatttcaatgcgccgtgataagggtggaggttccctccgtcgctgacgatcgcgtaacgcactttgtcgggatggcaggcggcgatgtcgaactggtgattggagaagggcgccagcatcaggtgttcgatggcttcgccgcagctccgctccgatgcgtcgaggaactccaactggctgaaggtgatgtggtagggcgaaggattgtgtgccttcggattgccgctggtgccgagcgtccacgtcacgccctcgttcgcctgctcgacggtggcttccaggggcggccgatagaacagcttgaagcgatggcgtagggcgatctgcagggtctcgggagtactgggcgcgtgcggcacgtccagcacgctcaacagcaggtaggtctcgcggtcggtgggcaggccctggccctggtagagcacctccaccttggcccgctggccggcgcccaggcggagcagcggcctggacacggcgaagggcagcgcctgccccttgccgtcggtaccccaatccagggagatttccgccagggccggctccttgccctcgttgaccagcgtgatcggcaggcgcttgcctttcatcacgaaacggttctggccgtcgaacgagagatcggcatgggcggacatgcacagccaggcgaatatcgatgcaagaaccatccgaagccaacttcggacctggaagaggcgctttccattcatattcctgaatgtgcccgaatgaaacccgtatcgtgttttggaaagtggttggtcggaagggtcgaatatatttttcgttatacttccgctgcgctttgaatggctatatttagggtggttggttgcgttcatggttcaagtctggataacttgttttcgttgcgcaccgctagggtggcaagagattcaatgtttctccatgttagaaacctgccagggaatatataaataagatatttcctatttcttgtaggaaatatcctaagcattacttgtagttttccgaggtagttgcgccgtttcttctagggagccgaatgccacatagaggacgaggccgattggagcaggagcagtcgatgactactggcttctacatgaatgatcaaatattgatcagatgtagtcctgtgtcctgggttgggttgacagcgtcatacagccacttatgatgcccttgagcctgacccccggcgtgccggggctccccgacaaaaggcgccatacaagcgtcgaaggaatcttccccatgagtgcaaccgcttccgtcgccacccgtcacgactggtccctcgccgaagtccgtgccctgttcgagcaaccgttcaacgacctgctgttccaggcgcagacggtgcatcgcgcgcacttcgacccgaaccgcgtgcaggtctcgacgctgctgtcgatcaagaccggcgcctgccccgaggactgcaagtactgcccgcagtccggccactacaacaccggcctggacaaggagaagctgatggaggtgcagaaggtcctcgaggcggcggccgaggccaaggccatcggttcgacccgcttctgcatgggcgctgcctggaagcacccgtcggccaaggacatgccctacgtcctggagatggtcaagggcgtgaagaagctcggcctggagacctgcatgaccctcggtcgcctgacccaggaacagacccaggcgctggcggacgccggcctcgactactacaaccacaacctggatacctcgccggagttctacggcaacatcatcaccacccgcacctacagcgagcgcctgcagaccctgacctacgtgcgcgaggcggggatgaagatctgctccggcggcatcctcggcatgggcgagtcggtggacgaccgcgccggcctgctgatccaactggcgaacctgccggagcacccggagtcggtgccgatcaacatgctggtgaaggtcaagggcacgcccctggcggaagagagggacgtcgatcccttcgacttcatccgcaccctggcggtggcccggatcatgatgccgaagtcccacgtgcgcctgtccgccggccgcgagcagatgaacgagcagatgcaggcgctggccttcatggccggggccaactcgatcttctacggcgaaaagctgctgaccacgaagaacccgcaggccgaaaaggacatgcagttgttcgcccgtctcggcatcaagccggaagagcgcgaagagcacgccgacgaagtgcaccaggccgccatcgagcaggcgttggtggaacaacgcgaatcgaagctgttctataacgccgcttccgcctgaccatactggaagggagggcgccgccgtcccttcgttgcagccgctgatgtcggccctgcgtggacgggtgcgcctgcgtccgtccagcaacacgagcgacctgccatgtccttcgatctcgcttcccgcctcgccagccggcgcgcggaagacctctaccgccagcggccgctgctggagtcggcccagggcccggacgtcgtggtcgacggccagccgctgctggccttctgttccaacgactacctcggcctggccaaccatcccgaggtgatcgccgcgctgcgcgccggcgccgagcgctggggcgtgggcggtggcgcctcgcacctggtggtcggccacagcggcccgcaccacgaactggagctggccctcgccgaattcaccgggcggccccgtgcgctgctgttctccaccggctacatggccaatctcggcgcggtgaccgcgctggtcggcaagggcgacacggtgctggaggaccgcctcaaccacgcttcgctgctggatgccggattgctctccggcgcgcgtttctcgcgctacctgcacaacgacccggcaagcctcgccgcgcgcctggacaaggccgagggcaataccctggtggtcaccgacggggtcttcagcatggacggcaatctcgccgacctgccggccctggccgccgtcgcgcaggcccgcggcgcctggctgatggtcgacgacgcgcatggcttcggcccgctgggcgccagcggcggcgggatcgtcgaacatttcggcctcggccaggagcaggtgccggtgctgatcggcaccctcggcaagggtttcggtaccgccggcgccttcgtagcgggcagcgaggaactgatcgagaccctgattcagtacgcccggccctacatctacaccaccagccagccgccagcggtggcctgcgccaccctgaagagcctggagctgctgcgccgcgaaagctggcggcggcaacacctggcggcgctgatcgcccgtttccgccatggcgccgaggcgcttggcctgaccctgatggacagcttcacgccgatccagccgatcctggtcggcggcagccgccaggccgtggccctggccggcatgcttcgagcccgtggcatcatggtcggcgcgatccgcccgccaaccgtgccggccaacagcgcgcggctgcgcgtcacgctgtccgccgcgcacagcgaagcgcaggtcgaccgcttgctcgaagccctcggcgaaagctggcgacagctgtcgtctagccttctggcagagatcgaagccgaggagggagacgatgcgtgaccacttgatcctgttgccgggctggggcctgggtagcgcaccgctggaaccgctgcgcgacgcgctgcacgagcgcgagccgcacctgaacgtgttgatcgagccgctgccgtcgctggacgacgccgccgactggctcgacgaactcgacgataacctgccgcgcgatagctggctggccggctggtcgctgggaggcatgctcgccggcgaactggcggcgcgccgcggcgacgattgccggggactgctgaccctggccagcaatccgtgcttccgcgtgcgcgaggactggccgaacgcgatgccggcggaaaccttcgaggacttcttcgaggctttcctgctcgaaccgcacctgacccgcaagcgtttcaccctgctggtcagccagggtgcgcgcgaccctcggaccctggcgcggcaactgcaggtggcgctgccgcagctggagcgcgaggcgctggtcgccggcctgcagttgctcggccaactggatacccgggccgccctggaaaacttccgcgggccgcaattgcacctgttcgccgaagccgatgcgctggtgccgctggccgccgccgaggccctgctcgagtggctgccggacgtcgaggtctcgaccctggcggccagtcacggcctgccgctggaatgcccggacgaggtggccggcgcaatcctgagattccttcgcgagggtgacgatgcctgacgattcctcgccgctgctggcgccccatggcgttgccgcgctgcccgacaagcgccaggtcgccgcgtcgttttcccgcgcggcggccagctacgacgcggtggccgaactccagcgcggcgtcggtgagagcctgctgtcggcattgccggaaggcttctcgccgcgccgctgggtcgatctcggctgcggcaccggttatttcagccgggccctggaacgacgcttcggtgcggccgagggcctggccgtggatatcgccgaaggcatgctgcggcatgcccgcgcgcgcggcggcgccagccatttcattggcggcgacgccgagaggctgccgttgcgcgacggcagttgcgacctgctgttctccagcctggccatccagtggtgcgccgacctcccggcggtcctggccgaggcgcggcgggtcctgcggccgggcggcgtgctggcgttcagcagcctgtgcgtcggtaccctgggcgagttgcgcgacagttggcgggtggtggacggcttcgtccacgtcaatcgcttccgcgccttcgccgactacctgcaacacgcggccggcagcggcctgctgccgctgaccctgcgccacgaggaccggctcctgcattaccccgacctgcgcagcctgacccacgaactcaaggcgctgggcgcgcacaacctcaaccccgggcggcccgacggcctgaccgggcgccagcgcatccgcgcgctggtcgccgcctacgagcgtttccgccagcccgaggggctgcccgctacctaccgcgtcgtcttcggcgtgctgcgcaaggattcctgaaccatgccggcgttcttcgtcaccggtaccgacaccgagatcggcaagaccaccatcgccgccggcctgctccacgcggcccggagtgccggcctgagcaccgccgcggcgaagccggtggcctccggctgcgagcccacggcgcaaggcctgcgcaatggcgacgcgttggtgttgctcggccagtgctcgctggcgctggcctacgagcaggtcaacccgctggccttcgcaccggccatcgccccgcacctggcggcgcgcgaggctggcgtcgaactgagcgccgcacgcttgcacgaggcggtgcgcgaggtgctggcgctacaggccgacttcaccctggtggagggcgccggcggatggcgcgtgccgttgctgggccgcgagaacctgtccgacctggcgcgcctgctggcgctgccggtggtgctggtggtcggcgtgcgcctgggctgtatcaaccatgcgctgctcagcgccgaggcgatcctgggcgacggcctggcgctggccggctgggtggccaacgtcgtcgacccggctacctcgcgcctggaagagaacctggcgaccctcgccgaacgcctgccggcgccctgcctgggtcgggtaccgcgcctggaggaagccactcccgcggccgtggccgcacacctcgacctgcggcccctgggtatcgggctataaacagcgggccgtccataaccaacgggcggtacccagcgccggccaagtctgcttgaatagaagccacttgctatcgcagtggcgcatgcgcgtccccaggagtagagggtggaaatttccggcaacgctttcgtcagtggcctcaacgcggtgcagtcgggcagcgcccgcgtcgcccaggccggcagcgagatcgcccgcaatactgtgggggcccgttcggcccaggccgagcagatggtcgaactgacccgcggcaagctcgaggcgcagagcggcgcccgggtcatcgaggtagccgacgagaccctcggtaccctgatcgatacccacgcctgacttcctggcggccggcagcggccgccccgacccttccttttccgactgtcacccggcggcccctgaagcctgccgggcgcttcgccatgggctttactgagagagacgaaagtgctttggaaggacgtggctgccagtgatttcgggcatgaccgagcggtcggttcggatgcttgacaagggattggcgtaaacgtatgtttcaaacgcctgtttgagagtcgggacgcatgagtgcgtccggcaaggcgaccgggagcgatcccgcactgcgaccgcagactctggacatccgtccggtcgccgattaaccagaacccttcgtagaggttgactgctatgcctgattacaaggcccccttgcgtgatatccgtttcgttcgcgacgagctgctgggctacgaagcgcactaccagagcctgccgggcgccgaagacgcgactcccgacatggtcaacgccatcctcgaggaaggtgcgaagttctgcgaacaggtgatcgctccgctgaaccgcgtcggcgacctggaaggctgcacctggagcgccgacggcgtgaagaccccgaccggcttcaaggaggcctaccagcagttcgtcgaaggcggttggccgagcctggcccatgacgtcgagcacggcggccagggtctgccggaatccctcggcctggccatcagcgagatggtcggccaggccaactggtcctggggcatgtacccgggcctgtcccacggcgctatgaacaccctgcatgcccacggcaccgccgagcagcaggcgacctacctgaccaagctggtctccggcgagtggaccggcaccatgtgcctgaccgagccgcactgcggcaccgacctgggcatgctgcgcaccaaggccgagccgcaggccgacggtagctacaaggtcaccggtaccaagatcttcatctccgccggcgagcacgacatggccgacaacatcgtccatatcgtcctggcccgcctgcccgacgccccgcagggcaccaagggcatctcgctgttcatcgtgccgaagttcctgcccaacgccgaaggcaacgccggcgagcgcaacgcggtttcctgcggttccatcgagcacaagatgggcatccacggcaacgccacctgcgtgatgaacttcgacgccgccaccggcttcctgatcggcccgccgaacaagggcctgaactgcatgttcaccttcatgaacaccgctcgcctgggtaccgcgctgcaaggcctggcccatgccgaagtcggtttccagggcggcatcgcctatgctcgcgagcgtctgcagatgcgctcgctgaccggtccgaaggcgcccgagaagcccgccgacccgatcatcgtgcatcctgacgtgcgccgcatgctgctgaccatgaaggccttcgccgaaggcaaccgcgcgatgctgtacttcgccgccaagcaggtcgacatcgtccagcgcagccaggacgaagagcagaagaaagccgccgactcgatgctggccttcctcacgccgatcgccaaggcgttcatgaccgaagtcggcttcgagtccgccaaccacggcgtgcagatcttcggcggccacggtttcatcgccgagcacggcatggagcagaacgtccgcgacagccgcatctcgatgctgtacgaaggcactaccggcgttcaggccctcgacctgctgggtcgcaaggtgctgatgacccagggcgaggcgctgaagggcttcaccaagatcgtgcacaagttctgccaggccaacgaagccaacgaagccgtcaaggaattcgtcgctccgctggcgcaactgaacaaggagtggggcgacctgaccatgaaggtcggcatggccgccatgaaggatcgcgaggaagtcggcgccgcttcggtggactacctgatgtactccggctacgcctgcctggcctacttctgggccgacatggcgcgcctggccgccgagaagctggccgccggcaccggcgaggaagccttctacaaggccaagctgcagaccgcgcgcttctacttccagcgcatcctgccgcgtacccgcgcccacgtcgccgccatgctgtccggcgccaacaacctgatggagatggccgaggaagatttcgccctcggttactgatggcacgggccgctggcggcccgttccccaggtgagaaagagcccgcccttcggcgggctttttcatgcctgcgatccgctgcatcctggccttccgacctcggggttatggcgttgcattcagcgtccgcagcgtgattgtaggcgcccgcccggcgcagtagcttcgagggattcgcgcctgtggggcgcccctgccgaggagaacagagatgccggaatacaaggctccgctgcgcgacatgcgcttcctgatcgatgaggtattcgacttccatgggcgctaccaggcgctcggcgccagcgacgcgaccccggacatggtggcggcgatcctcgatgaaggggcgaaattctgcgaacaggttctggcgccgctgaaccgctccggcgacgaagaaggctgccacttcgacaacggcgtggtgaccacgcccaagggcttcaaggaagcctatgcacagtacgtcgagggtggctggaacggtgtcgccagcgatcccgcgtacggcggccagggcctgccgcactcgctgggtctgctgctcagcgagatgatcggcgccagcaacgtctcctggggcatgtacccgggcctgacccgcggcgccatgtcggcgatccacgcccacggcagccaggcgcagaaggacctctacctggcgcggatgaccgccggcacctggaccggcaccatgtgcctgaccgagccgcactgcggcaccgacctgggcatcatcaagacccgcgcggtgccgaacgccgacggcagccatgcgatcagcgggacgaagatcttcatctccgccggcgagcacgacctgagcgagaacatcgtccacctggtgctggccaagcttcccgatgcgccggccgggaccaagggtatctcgctgttcatcgtgccgaagttcctacccgacgccgaaggtaacgtgggcgcgcgcaatgcggtctcctgtggctccatcgagcacaagatggggatcaaggcctcggccacctgtgtgatgaacttcgacggcgccaccggctacctgatcggcgagccgaacaagggcctgcactgcatgttcaccatgatgaaccacgcccgcctgggcaccggcatgcagggcctgtgccttggcgagaccagttaccagggcgccgtgcgctacgcccgggagcgcttgcagatgcgctcgctgaccgggccgaaggcgccggacaagccggccgacccgatcatcgtgcaccccgacgtgcggcgcatgctgctgaccatgaaggcgttcaacgaaggcaaccgcgcgctggcctacttcaccgcccagttgctcgacaccgagcacctgtcgcaggacgccgccgagcgcgagcgggccgccgacctgctggccttcctgacaccgatctgcaaggccttcatgaccgagaccgggcaggaggtgaccaacctcggcatgcaggtctacggcggccacggctacatccgcgagtggggcatggagcagttggtccgcgattgccgcatcgcacagatctacgaaggcaccaacggcatccaggccctcgacctgctcggccgcaaggtactgggcagccagggcaagctgttgcgcggtttcaccaaactggtccaccagttgtgccaggcccaggccgagcatccgcaactgaagggacaggtcgcgcaactggcggcgctgaacgcgcagtggggcgaactgacccagcaggtgggcctggcggcgatgaagaatgccgacgaagtgggcgccgcctcggtggactacctgatgttctccggctacgtgaccctggcctatttctggttgcgcatcgccctggtggcgcgcgagaagctggatgccggcagcggcgaggccgcgttctacgaagccaagctggccaccgccgacttctacttcagtcgcctgctgccgcgcaccgcggcgcacgccgcggcgatccaggccggcgcggcgggcctgatgagcctgtcggcggagcagttttcgctctagcggctgccggggcaggggcgcggcgcttcttcccccggtttctcccgcacccgccgggcccgtcggactcccggcgaactcgctcgagcccgcgaaaagcgggctttctcatgcctgtcgcatagaagaccgatatagactttccggtcacgacgtgacgctacaagtccgaaatgttggtggtgtagactcggccgcggcacgcctttcgtgcctccattttgttgccgctggcccccggccggcgatcggtacgatcgaggattccccacatggctgattacaaagctccgctgcgcgacatgcgcttcgtcctcaatgaggtgttcgaggtctcccggctctgggcgcaactgccggcgctggccgaagtggtcgacgccgagaccgccgcggcgatcctcgaagaggccggcaaggtcaccgccggtaccatcgccccgctgaaccgtccgggcgacgaggaaggctgccagtggaacgctggcgcggtgagcaccccggccggcttccccgaggcctaccggacctacgccgaaggcggctgggtcggcgtcggcggtgatccgacctacggcggcatgggtatgcccaaggtgatctcggcgcaggtcgaggaactggtcaactcggccaacctgtcgttcggcctgtatccgatgctgaccgccggcgcctgcctggcgctcaatgcccatgccagcgacgaactgaaggacaagtacctgccgaacatgtacgccggtatctgggccggttccatgtgcctgaccgagccgcatgccggcaccgacctgggcatcatccgcaccagggccgagccgcaggccgacggctcctacaagatcagcgggaccaagatcttcatcaccggcggcgagcatgacctgaccgagaacatcatccacctggtgctggccaagctgcccgacgccccggccgggccgaagggcatctcgctgttcctggtaccgaaggtgctggtcaacgccgatggctcgctgggcgagaagaacagcctgggttgcggctccatcgagcacaagatggggatcaaggcctcggccacctgcgtgatgaacttcgacggcgctaccggttggctggtgggcgaggtcaacaagggcctggcggcgatgttcaccatgatgaactacgagcgccttggcgtcggcatccagggcctggccactggcgagcgctcctaccagagcgccatcgaatatgcccgcgagcgtatccagagccgcgcgccgaccggcccggtggccaaggacaaggccgccgacccgatcatcgtgcaccccgacgtgcgtcgcatgctgctcaccatgaaggcgctgaacgaaggcggccgcgccttctccagctacgtcgcgatgcagctggacaccgccaagtacagcgaagacgcggtcacccgcaagcgcgcggaagagctggtggcgctgctgaccccggtggccaaggcattcctcaccgacatggggctggaaaccaccatccatggccagcagatcttcggtggccacggcttcatccgcgaatggggccaggagcaactggtgcgcgactgtcgcatcacgcagatctacgaaggcaccaatggcattcaggcgctcgacctggtggggcgcaaggtgatcggcagcggcggcgccttctcccgtcacttcaccgacgagatcaaggccttcgtcgcttccgccgacgaggccctgggcgagttcagcaagccgctggcggccgccgtggagaacctggaagagctgaccgcctggctgctcgaccgcgccaagggcaatcccaacgagatcggcgcggcgtcggtcgaatacctgcatgtgttcggctacaccgcctatgcctacatgtgggcattgatggcgcgcaccgcgctggccaagcagggcgaggacgacttctacgccagcaagctgggtaccgcgcgcttctacttcgcccgcctgctgccgcgcatccattccctgagcgcctccgtgcgcgccggcagcgagtcgctgtacctgctggacgccgagcagttctgaggcctggcgcctgagacggaaagccccgcgatgcggggcttttttctgggcgccgggggctcggcgcgcgggacgggtgggggggatatccgcttgcggctatccgccattcccagggttttctcggggccgtgatgggacagggtgatcggcgcataacgccgttggcgttatgcgccctacggctcctcgcgcagggtgggcggtagggcgaataaccgcttgcggttatccgccattcccgtggtttttctcgtgccgtgatgggacagggttgtcgcggtccgccgcggaggatacggggatatccgttgatggcgtctcgcccgagcctcagtgcgaggttccctccgcatagccgatcttgttgccgacgttgtacttgcccgacggcttgttcatcggcagtcgcttcacttcctccaggctgtgcgcgtcgtagaccaccagcgcgccgtcgcggtcccagacgctgagcagggcgtagcggccgtcgcgggtgaactcgacgtggccggccaccttgcccgggctggggcgcaggcgatgggcgatttccagggtctgcttgtcgatcagcaggatctcgtcgtgtttcttgccaaggaaggtatcggtccaggcgtagggcgagtcggcatggctgcgcatgaagaagccggggccgtcggtgacgatttccttcaacggcttccagttttgcaggtcgatcaccgagatcaccccgcggctgatgttcggcgtagcgaacacccagcgcccgtcgcgcttccagtagatgcccgagccgaggtgcggcatgcccgacagcgggatcgaggcgacccgcgcgccgctgtccagctcgatcacctcgccgcccctggcctgccgcgagctgcccagcaggtagcggtagtcggggctgaaggagaagtcgtcgaggtagtcggccaccgccaaccgtttcggcgcgaccggcttgccgttggcatagggcagctcccacagctcgtggacgtccttcagggcgaccacgaagctgtgtcgcggcggtgccgtgtataccgcgctgacccgcgaggcctggccctgggcgtcggccgccgggatgacctgcaccagggacaggtcgcgggcgtccagcagcaccaggttgccgggcaggtagttgcccaccaggacccagcgcccgtcgtcgctgaccgccaggttgcgcgtgttgaggccggcgcggacctcggcgaccaccttcaggttgtacaggtcgtagagggttacccagccgtcgcgcgaggcgaagtacaccaggcgcccgtccggggagaacttcggacctccgtgcagggcgtagcgcgaggggaagcgggcgatgggctcgaagcgatcgccgtcgaggatggtcacgtggtggtcgccggactccaccaccacgaacaggttcagcgggtcggcctcgaagcggggcctggacggcagggtggcgaggggatgcggctgaacctggctggcccggatgtcctcggcgctccactgcggttcgcgcggcggcgcctggtagagataggcgaccagggcgtccgccgcggcgtcgtccaattgaccggcaaagccggccatctgggttgccgggcgaccgtgcaggatcacctcgcgggcctgcgccggcttcagccgcgaaaggctttccgggagcagggtcgggccgctgccgccgagccgtccggcgccgtggcaggcctggcagtgctggcggtagagcgcttcccccggcgcttcgccggcctgtgcgagggcgccgaggagcaggccgagggcgaggccgatcaggcgcatgcgacggcctcgcggctgaccggcgagccggcgcccaggtatgacggatgcgccatcgcgcgctcggcgaagagcgcgaccacctggccgacgacgatcagcgtcggcggcttcaactggtagcgtcgcgccagcgccggcagctcggcaagggcgccgcgggtcacctgctggcccgcctgggtgccctggctgaccagcgccgccggggtgtcgctggcgaggccgtgctcgaccaggcgcgcggcgatctcggcgaggttgcccaggcccatgtagaacaccagggtctgcttgccacgcgccaggccggcccagtcgaggtcgaggcggccgtcgttctgcaggtggccggtgacgaaggtgcaggactgggcgaggtcgcggtgggtcagcgggatgccggcgtaggtactgcaaccggaggcggcggtgacgccggggaccacctggcagtcgacgccggcttcgagcaggcgctccagctcctcggcgccgcgaccgaagatgaacgggtcgccgcctttcaggcggaccacccggcgttgctgccgggccaggcgcaccagcagctcgttgatttcttcctgcggcaggctgtggtggccgcagcgcttgccgacgtagatgcgctggcagctttccggcagaagggcgatcagctcgcgggcgaccaggcggtcgtagaccaccacctcggcctgttgcagcagggcccaggcgcgcagggtgagcaggcccggatcgccggggccggcgccgaccagggcgacgctgccggcagggaaatcgacatcgaggagggacggcggaatcacggtagtgttcatgaggctttccttagacggcgtgcagcgcgatgcgctcgaggccgatttcctgatcgctgaggtagcagccggggtcttcgccccagagttctccgccggcccaggcgcgggtgcgggtgttgccgttgcagatgtccagccagcggcattggctgcagcgcccgaccaccggtcgcgggcgctggcgcagttgcaggagcagcgggtcggggcgctcgaaccagaagtcggcgaagcgctgatggcggatgttgccgacgctgtggtgccaccagtagctgtccggatgcacctcgccggtgttgtcgatgttggcgatgccctcgcccgaggcgttgccgccccagtccagcagcagctcgcagagacgcgccagttgctgcgggcggcggcgcttgagccagtcgaggagaaggatcgcgtcggcgtcgttgttgccggtgacgaagtcgctgtcgcgcccctgccggatgtcctcgtcggcccgttcgaagagcagcgcgagggcctcgcgggtgcgccggtggtgggcgtcgagggcgcggctgcggcggccgcggccactgtagttgaggtgcgagaggtagaacttctgcacgtcgagttcgcgcatcaggtcgagcagtgccggtagttgcgcggcgttctcctcggtcagggtggtgcgcatgccgacgcggatatccgcctcgcggcacaggcgcatggccgccagcgcggcgtcgaagctgccctgcttctggcggaagcggtcgtgggtctcgcgcaggccgtcgaggctgatgccgacgtagtcgaagcgggcctcggcgacgcgctggatgttgccttcgtcgatcagcgtaccgttgctcgacagcgccacgaacatcccggcctggcgcgcatgggcggcgatctcgaagaggtccgggtgcatcagcggctcgccgccggagaggatcagcacgcgcactccggcggtgcgcaggtcgtcgatgccgcgaaggatttccgcggtctccagctcgccacggaagtcgctgtcggcggaggtggagtaacagtgcttgcaggtcaggttgcagcgccgcagcaggttccagatcaccaccggggcgcgcctgccgccggcgcggcgcggcgtcggcgcgtcctcggcgaggctgcgcaggtaatggctgatcctcagcatggacgttcctccttctgcgccaggcgcaggccggtcttcttcaggatgcggctgctcaccagcatctcgtcggcgcgacagtcctcgccgagcagcaggcggatctgctggcgatagccttcgatctccgcttcgctgcggccgtgaaccatggcgaacaggttgtagcgccactgcggcagatggcgcgggcgccggtagcaatggctgacgaaggacagcccgccgaccagccggccgaggcgttcgatgcgttcgtcggcgacgtcccagacggtcatgccgttgtgccggtagccaaggcgatagtggttgggcaccgcggcgatgcgccggatcaccccggcgtcgcgcaggcgcttcagcagcgccagggtctccgcctcgctcagccgcagttgcgcggcgatccacgcccaagggtcggcgaccagcggcaggccggcctgggtcagttcgatcaggcggcgggcgagcagggcgtcagagggggaaatgcaggccgacatggtaggtcgcctccttgggcaggtcgagtaccgccagcccgctctcgcgctccagccgtgcgagggtctcggcgacctccgccgggctgtcgcaggcgaccaccagccacatgttcagggcgtgctcgcgacggtagttgtgggcgacctgcggccagccggcgagcagcgcggcgatctcttcgaaacgcgcctccggcacgctcatggcggccagggtgaaggcaccgccgaggggctcgatatcgaacagcggaccgaagcgggtcagggtgccgtcgtcgagcaggtcgtccaggcggcgcaggatgtcttcctcgcggcaatccagctcggcggcgagcagcgcgtagggatgcggctccagcggcaggccgtgttgcaggcggttcagcaggcgccggtcgaactcatccatggcggcgctccaggtcggccggcggcgcggtgtagcggccgccgcactgcttgtaggcgcgcaggctgaacagccagcggtgcggtgtctggcgcagggcgtggcgctccagcagcgcctcgatctggcgttccacttcgccgcgctcgcggccgtggatcatgcaaaacaggttgtatggccacatcggcaggcgacgggggcggcggtaacagagcgagacgatcgtttcgtgggcgagggcgcggccgacggcgtcgacctccgcgtcggcgacgtccagcaccagcatggcgttggcggtatagcccagggcgcggtggtggaggatcaccccgaagcggcggaacaggccgtcttcgtcccagcggcggacctgttccagcacttcgtcttcgccggcgccgatgcgttcggcgagcacccggtagggccggctggccagcggcaggccctgttccagcaggtagcgcaggtgttgccgctgcggcgcggcgaggggttcgacggggttcatcggctggcctccaggggaaacgcgaggtcgatgcagtaggcttcctgcatcggcaggtcgaggggttgcaggccggtgtcggcggcgatctccgccagtacccggtcgagttgcgcgcggtcgccggcggtgagcacgaaccacaggttgtagcggtgttcgcgctggtagttgtggttgacctcggcgtactggctgatgcgctcggcgacccgttgcagacgctcctcgggcaccgccagggcagccagggtgctggccccggcgcgttggtggcggaacaccgggccggcccgcgacaacgcgccgtcggcttccaggcgacgcagccgttcgagcacctcggcttcgctgcaacccagggtctcggccatccgtcgataggggtccgcgcagatcggcaggcctttctggtagcgggcgaggaggcggcgggagaggtcgtccatggtgcctcctagagtccgatgtgctgggcgcggtggctgaagaagatgccgctcgggctgcgggccggaaggctgccgatgcgcttcaggcggtacgggtcccagacctgcaactggtcggcgtcgcgcaccgagatccagacctggtcgccgcgcccgctgaattccatgtgcagtacgccggggccagggcgcagggtttcgatcacttcgtgggtctcgctgtcgatgacctgcactttgtcgttgtccgggtaggcgaagttgacccagatctgccggtcgtccggtcgagtcatgacgaacaccggctggccggcgacgtcgatggcgtcggtctgcttccagtcgcgcgcgtcgagcaccagcacctggtgatggccgaccgccgggacgaaggcctggtcgctggcgatggtccagccctccaggtgcggcatcttgtacaccggcagcttgcgttggccgcggccgtagtcgccgagtacgcgcctgacgccgcgctccgggtgccagaggtcgagctgggccatgccgtcctcgccgaacagcccggccatgtagtagcgcccgtcggggctgatgagggcgtcgtagggttgcttgccgatatcgcggaagcgggtcaggtgcggcgtgtcgccctggctgaagtcggcgatccagatctcgccgctgtcgaacaggctgaacacgaagcgctgcccgggcgcgtcgaccaggccgaccacccgggagttcctgtcctggccggggaggcgggtggcgggaatctcagcgaccagctccagggtgcggctgtcgaacaccttgaccccgcccggctcgtagttggataccgcgaccagccgaccgtcctggctgatcgctccgccgatgctgttgccgccctggatcaggcgcttgtcgatgcgctgggccagcaggtcgagcttggtcaggccgccgtcgcgaccgaatacgtaggcgtagcgctggtcgcgggagaacaccagggaggcgtgggacaggtcgccgaggccttcgacccgcgccagcgaggtcttcgccgtgccgtcgaggatctgcacgctgccgtcggcgcgttcgatcagcacgccgaggtcgccgctgccgcgcaagggcggctgctggctacagccggcgagcagggcgaggaaaagcggcgcgaggggacgcaggttcatggggcgatctctccttcgatcaggcggtccaccagccagccggcgtcgtcttcgctgagcaggccggcccaggggggcatcggggtttgcggacggcccatgagcacggtggcgaccagcgattcgcgcggcttgccgcgcagggcctcgggggtcagcgccgggccgaggccgccggtcaggcgcaggccgtggcaggagccgcagtcctgcaacagcaggtgacgcaactgggcctggcgacgggcatcgggatgctcgtcggccaggcccggaagaggacaggcgaacgtcagcgcgagggccagccacaaggcgtggctggcggcgcgccggaagtccggaggggcgttcatttctgcgacaggacccacttcgccagggtctgcgcctcgtcgtcgctgaccgcgttcggcggcatcgggatcgggccccagacgccctggctgccgttcttgatccgctgcgcgagttccgcttcggcgccggcctggccggcgaacttggcggcgacgtccttgtaggccgggccgaccatcttggtgtcgatggcatggcaggccacgcagcccttgttcttgaacagcacttcggggtcttcggcccaggcgccctgggcgagcagggtgccggtggcgagcagcgaaagcagtgcgtacggtttcatcacggttcctcgtaggggggagcgtgcggggcgtgccccgcacgcgggtctcagtacacgtcgtgctgggtgttgtagacgttgaactttccggtcggggtgatcagccgcgggtccttgaccacggccttgagcttcagggtcttgtcgtccaccaccaccagcgcggagctgtcgttcttgccgttccacaccgagaaccagacttcatcgccgcgcttgttgtactcgggctgcaccacccgcttggcgccttcgccgagatcggcccattcggcgatcggcagcacctggtacttggcgtcgaggttcttcaggtcgaacaccgcgacgctctggctgatcctggcgtcggggttgaaggtggtgtcgacgtagaggtgcgaggacttcggatgggtcttgatgaacagcgagccgccgccctggccctgtagttcggcgactttcttccaggcgtactgcggatggttcttcggatcggtgccgatcagcgagatgctgccgtcgcccaggtggctggtgctccacaccgggccgtacttgggatgcacgaagttggcgccacgccccgggtgcggggtcttgccgacgtcgaccagggccgacaggcgacggtccttggagtcgatcacggcaaccttgttggagttgttggcggcggtcatgaagtagcggtggctgctgtcccagccgccgtcgtggaggaacggcgccgcaccgatgctggtgacggtgaggttgtcgatatccttgtagttgaccagcaggaccttgccggtctccttcacgttgacgatgaactcggggtgctcgtgggaggcgatgatcgccgccacgcgcggttccgggtggtaggtctgggtgtctacggtcatgccgcgggtggagacgatctgcttcggctccagggtctcgccgtccatgatcgcgaactgcggcggccagtaggcgccggcgatggtgtagcggtcctcgtagcccttgaacttggagctttccaccgagcgcgcctcgatgccgatcttgatctcggcgaccttggtcggctccttggcccacaggtcgatcatgtcgatccgcgcgtcgcggccgatcaccagcaggtagcggccggaagcggacatccgcgagatatgcacggcatagccggtatcgatgaccttgacgatcttcttgctgtcgccgtcgaccagggcgatctgcccggcgtcgcgcagggtcaccgagaacaggttgggcaggtcgaggtcgttgagctgtttcttcggccggtcctccggcttcaccagcaccttccacgattcgcgcatctccggcatgccccactccggcggttgcggcggggtgtgctggatgtacttggccatcagggtgatctgttccttgctcagctcgccggagctgccccagttcggcatgcccagcggggtgccgtaggtgatcagcgcttccaggtattgctggccgcgttgctgggtgatgtccggggtcagcggcttgccggtggcgcccttgcgcaggacgccgtggcaaccggcgcagcgttggaagtagatctgcttggcctcgttgaactcgctttcactcatgtcgggggcaccgttggtgcgcaccacgtgagcgggatcgacggcggaagcggcaccctggtattgctcggcggctttcatgtcgtccttggcgtgagcggtggccaggcccagcagcgtcagcgaggcgagcaaggtgcccaccagtggcttgccaaatggcatggtctatctcctcaggagccctgcgaggcgctcccttagcagtgttttgggggtggctgcgtcgggaactcccgggaattcatggcgcgaaaggatcatagaaagcagggtctttacccttgcttgaccggaatcaagattgcgttgctttgcgcttgtggcaccttccaactgtgaatagcgtgcggtcctaatccctagcgcaggagtaggacatgcgggacgcgacacccttctacgaggccaccggccatgagatcgaagtcttcgagcgcgcctggcggcacggcctgccggtattgctcaagggccccaccggttgcggcaagacccgcttcgtccagtacatggcgcggcgcctggaactgccgctgtacagcgtcgcctgccacgacgacctgggcgccgccgacctgctcggccgccatctgatcggcgccgacggcacctggtggcaggacggcccgctgacccgcgcggtgcgcgaaggcggtatctgctacctggacgaagtggtggaggcgcgccaggacaccacggtcgccatccacccgctggccgacgaccgccgcgagctgtacctggagcgcaccggcgagacgttgcaggcgccgccttcgttcatgctggtggtgtcctacaaccccggctaccagaacctgctcaagggcctgaagcccagcacccggcagcgtttcgtcgcgttgcgcttcgactacccggcggcgcagcaggaggcacgcatcctggtcggcgagagcggttgtgccgaggccctggcgcagcgcctggtgcagttgggccaggcgctgcggcggctggagcagcacgacctggaggaagtcgcctcgacccgcctgctgatcttcgccgcgcgcctcatcggcgacggcatggacccgcgcgaggcgtgccgggtggcgctggccgaaccgctctcggacgacccggcgacggtggcggcgctgatggacatcgtcgatctccatgtcgcctgataccgtcgagcggcgcctgcccggcgacctggcgatgtggttcttcatcctcgccgaactcagcgtgttcagcctgctgctgctggcgttcgccggcgcccaggcctggcagccggagctgttccgtgccggccgggagcaactggatagccgctggggcctgttgctgaccgtggccctgctcagctccggctggctcgccgcgctggcggtgcatgcggtgcgccgcggacggccgcgccaggcgagcggctggttgctggcggcgctgctgctggcgctggtctacgtcggcctgaagctgcacgagtacgggcggctcgccgatctcggcctggacatcgagcacgacactttcttcaccctctactggtgcctgaccggcttccatttcctccacgtcctgctcggcctgctgatcctcggctggctggcgcaggcctgctggcgccggtgttatacgccgcaggcttgctcgggactggagtcgggagtgctctactggcacatggtcgacctggtctgggtgctgctgttcccgctggtctacgtcctgcaatgaggtgccgatgcgaaccctgaccctctgctggctggcgttgctggcgctggccgtgaccggtgtgctgctgggcggcgccggcgactctccctggctgctggcggcggtgctggcctgcgcggtggccaagggttggctgatcggcgagcgcttcatggagctggcccatgccccggcgctatggcgccgcctgctgctggcctggccgctgctgatggccctggcggtgggcgctgcgctgtacctggcgcggatgaataactgagtaaatcgttcgggaatcttgattgccatcaagcgggttcgccgccgccgcttcctagaatcgccgcaccacccattccaggaggccgcatgtccgagacctttaccaaaggcatggccaggaacatctatttcggcgggagtgtgttcttcatcctgctgttcctggccctgacctaccacaccgagaagaccctgcccgagcgcaccaacgaggccgcgatgagcgccgcggtggtgcgcggcaagctggtctgggaacagaacaactgcgtcggctgccacaccctgctcggcgagggcgcctacttcgcgccggagctgggcaacgtggtcggacgccgtggcggcgaggagggcttcaacaccttcctccaggcctggatgaagatccagccgctgaacgtgccgggccgccgcgccatgccgcagttccatctcagcgagggccaggtcgacgacctggccgagttcctcaagtggagctcgaagatcgataccaaccaatggccgccgaacaaggagggttgatgatgtcgcccaatggctccctgaaattcgcctcgcaggcggtcgccaaaccctacttcgtgttcgccctgatcctcttcgtcgggcagatcctgttcggcctgatcatgggcctgcagtacgtggtcggcgacttcctgttcccggcgatccccttcaacgtcgcgcgcatggtgcacaccaacctgctgatcgtctggctgctgttcggcttcatgggcgctgcctactacctggtgccggaggagagcgactgcgagctgtacagcccgaagctggcctggatcctgttctgggtattcgccgccgccggcgtgctgaccatcctcggctacctgctggtgccctacgccggcctggccaggctcaccggcaacgaactgtggccgaccatgggccgcgagttcctcgaacagccgaccatcagcaaggcgggcatcgtgatcgtcgccctgggcttcctgttcaacgtcggcatgaccgtgctgcgcgggcgcaagaccgccatcagcatggtcctgatgaccggcctgatcggcctcgccctgctgttcctgttctccttctacaacccggaaaacctcacccgcgacaagttctactggtggtgggtggtgcacctgtgggtggaaggcgtgtgggaactgatcatgggtgcgatcctcgccttcgtgctggtgaagatcaccggggtcgaccgcgaggtgatcgagaagtggctctacgtgatcatcgccatggcgctgatcagcggcatcatcggcaccggccaccactacttctggatcggcgtgcccggctactggctgtggctcggctcggtattctcggcgctggagccgctgccgttcttcgccatggtgctgttcgccttcaacaccatcaaccgccgccgccgcgactatccgaaccgcgcggtcgcgctgtgggccatgggcaccacggtgatggccttcctcggcgcgggagtgtggggcttcatgcataccctggcgccggtcaactactacacccacggcacccagctcaccgccgcccacggccacatggccttctatggcgcctacgcgatgatcgtgatgaccatcatctcctacgccatgccgcgcctgcgcgggatcggcgaggcgatggacaaccgctcgcaggtcctggagatgtggggcttctggctgatgaccgtggcgatggtgttcatcaccctgttcctctccgcggccggggtgctgcaggtctggctgcaacggatgccggcggacggcgcggcgatgaccttcatggccacccaggaccagctggcgatcttctactggctgcgcgaaggcgccggggtggtgttcctcatcggcctggtcgcctacctgctgagcttccggcgcggcaaggcggccgcctgagatggccttcgccgtcgagctggaggaatgggtcggcgcccactggcaccgcttcatcacccgccatgccagcggcgagttcgaggcggcgcgggtgaccctggagagcatgcggcgtccgctcggcatgctcttccgggcgctcggcggcgcaccgggggtagccctcgaggcgaccccggcgcgccgcctgctgctacgccgcacctggttgcagcgggtcgccgggacctgcgagcaggccccggtgtcctggttcaacggcgacagcctgcgcctgccggaatccctcgcggtctatccgcaggccgagctgaaccgcgaactgtatcgctggctggcgctgctggcggccagcgccgggccgctgcggcactgggcccaggacaaccagcgctgggcgcggcagttgctcgatgcctatccggcgctgcgcccgcgctacgcccggctggtcgccgcgcatctgcgccagcgcccgtcgctggacgattgcccggcggcagacgccgaactggaaatcgccctgcgccgcgcgcttgccgagccgggcagcgtcgagcgcttcccgcgagtcgagcgggcgccctggccggtgccgctgtggctgtatcccggcgagcgctggacgccttccgccagcgcggaggacggcgaggaagcggccgccggcgccggcaagcgccaggtcgcccgcagcggagcgcgcaagcgcgccgagcgcgtcgaggagcgcgacagcgagcgcaacctgctgctgttccgcctggaaagcctgctcagttggtcggagcacctggccctggaccgctgtagcgacgacgaggacgacccggacggcgcgcgcgtcgccgaagacctcgactacctgtcgctgtcgcgccagcgcacgcagaagggtggcggcctgcgcctggatctcgacctgccggccgccgactacgatgacctgccgctcggccccgggctgaagctgcccgagtgggactatcggcagcagcgcctgctgagcgaccacgtgctgctgcaaccgatgcggccgcgcggcgcgaccagcgccagcctgccggcgcacctggagaagaccgcgctgcatctgcgccgccagttcgcctgcctgcgcgacggccgccaacgcctgcgccagcagccgcaaggcgacgagatcgacctcgatgcctggctcgacttccaggtcgagcggcgccgcggcggttccacccagccaggcctgttcctcgaacagcggccgcgccggcgcgacctcgcctgcctgttgctggcggacctgtcgatgtccaccgaagcctacctcgacgaccagcggcgagtgatcgacagcatcgtcgacagcctgctgctgttcggcgaggcgttgcaggcgctgggcgaccccttcgcgctgtacgggttttcctcggtgcgccggcagcaggtgcgctggcaggtgctgaaggacttcgacgaaggctacggcggcgaggtccgcggtcgcgtgctggcgctctcgccgggctactacacgcggatgggcgcggcgatccgccgggccagccaggtgctcggcgggcagccgcagaagcgtcgcctgctgttgctgttgagcgacggcaagcccaacgacctggaccgctacgagggccgctacggcatcgaggacacccgccaggcggtgatcgaggcgcgcagccagggactggtgcccttctgcatcaccatcgacaaggaggcggcggactacctgccctacctgttcggcgccgacggcttcgcgctggtcgagcgcgccgggcagttgcccgagcgcctgctccagctctatcggcgcctgcgccgctgagatgcctcagggagcatcgcgcggcaaccagagcatcatgcccaggcagaacagcgccagcccgacgcagaaccaggcgaagcgccgctgccggcgaccctggagctggcgctgggaagcgctgggcagcggcatgccgcactgttcgcaggcgctttccgcgccttcggtttcatggaggcaatacaggcattggcgcatgggcgttctcgcgggctcgaccccgccagcttgccggcggacgggccgtggcgcgcttgaccgcgatcaagcggcggcgctgttcactcgaagcactccaggcgttcgcggtcgaggatgctgatttcgcggccgtcgaggcggatgatgccctcgtcgccgaggcggtgcatgattcgcgagaaggtttccggctggatcgacaggtgaccggccaccagttgcttggccaccgggatttccacccggcagttctcccccggcgcgtgggctgcgagggtcagcaggtagcgcaccacgcggtgggtggcgttcttcagggaaagcgtctcgatctcgtcgatgcgctggtgcaggcgggtgctgagcttggccagcagggccagggccaacggggtgttgtcctgcaactggcgcaggtaggccttgttggagaaacggaacagctggctgggcaccacggcctgggcggtggccacgtagttcggggtgtccatgaacatcatcgcctcggcgaaggtgttgcgttcgttggtcacttcgagaatcttctcctggccttccggggtcagccggtagatcttcacgcagccggaaatcaggtagtagaaggcgtgcgccggctcgccctggcggaacacgtaggcgcccttgtcgaggttgaccaggtcgctgctggcgagcagttcctggagctggacgggagaaagcggttcgaacaggtggtggctttgcagcaactgctggtggacgcgctggaattccatgctgggaaggctcgcgatgatgaggggactggccactgtagcgggcccggcgcagatcatcttgacgcacggcaagctcccggcggctgggtgttgccgtcggtccggcgagcggaactattacagcgtgtaagccaaggcttacaaacggcggtggttttggctgctttctccccctcgcagagatgcgtaatcttcaaaccgtcaggacattgcgcaggaagcgccaaagacaatacggaaactcagggaatccaccatggatggtggcgtagcacggatgtcaggatagaggtctgcaaaaccccgcccaaaaggcggggttttttattgcccgaggaaaaccgcgtcgctcagaccacgccttccagcagcgagcgcagcagctcgacgctggcgtgctggcgttgcgcgtcgcggtagaccaggccgaccttcagcgggatgcgcggttcgctgagcggtttccacagcagccgctggttcgagtgcatctgccgtgccttgcccggtagaacggtggcgaagcgggtctgcggcaggctgtcgagaatcccgctcatgtggttcagttccgcctgcacccgcggccgccggccgatcgcggcgagttgctcctgccagatctggcgcgcacggaactcctcgccgagcagcagcatcggcaactccgcggcctgggccagggacaccttcctgaattccttcaacgggtgttcctcggggatcaccagctgcaattcgtcctcgtacagctcgacgctgtgcaggcccggctggcgcggcggcaggaaaccgatgccgatgtccaggttgccggtgagcaggcgccgctcgatgtcgattcccgacagttcgtagatctgcacccgcaggtgcggctgcgcggcatgcaggcgttcgaccatgtacggcaccaggctggcgttgaccgtctgcagtacgccgatcgccaggctgcgcggggtctgcccgcggaatacgcgcatcgcctcgcgggccctttccaatccctccagcagcggtaccgcatggttgtacagggtgtgggcggcgacggtcggcagcaggcgcttgccgctgcgctggaacagcgagacgtcgaggttctgctccaactggcggatctgctgcgagagggccggttgcgacagggccaggcgttcggcggcgcggccgacgtggccttcctcgtagagcgcgacgaaatagcggagttggcgaaaatccataagctgttcttatcgatgaagctggaaaatcgaaatggagtgggtcccgcgtgaggcactagtctagctgcattggcggtacatcgggtgggcgcggagcaatggagcagatagtcgtaaacggtgttttcataggtaaagtcgaagaaacctggggcggattggtcagcgcgatcgacaggctgccggtcgagcaggaattctggctgggccacgatggcctgcccggcgacgaacaggccgacatccgccaccacggcggcctcgagcgcgctcttcatcactatcccgccgagcactaccgctactggcgcaagcgccacccgctgaaccgctggcaactgccggcgttcggcgagaacatctcgacctacggcatcaccgaagccgaggtctgcatcggcgaccagttccattggggcgatgctctgctggaagtcagccagccgcgttcgccctgctatcgccagggccagcgctggaatcttcccgagctgcccgacgaattgcagagcggcggccgctgcggctggttctatcgggtcctgcgcagcggcatggtgactcccggggacgagctgaagctggtccagcggcattaccctgaactgaccgtcgcccgcctgttgcagtggtatttcggcgatcccctggagcctctcgggttgcgccagatgatggcctgcgacgcgctatcccagcgttggcgcaagacagcggcgaaacgcctgtccagcggcgtggtggaagactgggggccgcgcctgcgcggaccgtcggattaccgggagcatgcctcttgagcgactacctgatcaccctgagccagtccggccggctgttggccagcatgacggtgagcgccgcgcgctttgccgaggtgcgcgagctgatgcgccagcgcttccccgccggcgacggcttcgaactgcgcatcgaaacgcgccgggaaagccgccggctgctggaacaggggccgcagggcgtgcgcttgctggcggtggagtacatgaccgaggaactgaaagatggctgatgcgctggatagcctgcgcctgatgcgcacccaggaacggcccgaacaggtgttcgtccgtggccagggctcgtggctgtgggacagcgacggacgcgccttcctcgacttcacccagggcctggcggtgaactgccttggccacagtcccagcgtgctggtccaggccctggcccggcaggcgcgggagctggtcagcgccggccccggcctgctcaaccggccggtgctggcattggcgcagcgcctgtgcctggcgaccggcagcgaccaggcctacttcctcaccagcggcgccgaggccaacgaagcggccatcgccctggcgcgcaagtggggccgcctgcatcgcggcggcgcgcaacggatcgtcagcactgtcaacagcatccatggacgcaccccgggcaccctgacggcttgtggcaagccggcgcagcatggcctggagggattcgccagggtgccgttcaacgacctcgacgccatggccgcggccatcgacgaagagacggtggcggtgatgctggagccggtgcagggcgatgccggggtgatcccggcgaccctcgactacctgcgtggcatcgagcggctgtgccggcagcgtggcgtcctgttgatcctcgacgaggtgcagaccggcatcggccgctgcggcgcgctgctggcggaggaactgtacggggtacgcgccgacatcgttaccctcggcaagggcctcggcgccggggtgccgctgtcggcgctgctggcgcgtggcaacgcctgctgcttcgaaccgggcgaccagcttggcacccaccacggcaacgcgttgatgaccgctgccgggctggcggtactgaataccgtgctggagccgggtttcctggagcaggtgcgcgagcagggcactcacctgcgcgatggcctggcccgtgtcgcgcgtcgctatgggcatggtccgctgcgcggccagggactgttctgggggctgccgctgatcggccagcgcgcgccggcggtggttcgcgcggcgttcggcgaaggcctgctgatcaacgcgccgcagccgcattgcctgcgtttttccccggcgctgacggtgagccgggccaacgtcgacgaaatgctgcggcgactggagcgggccctggcccgggtcgccaaccgacacgaggaggtggcctgatgcgcgccctggtattgcaacacgttcccttcgaaggcagcgcgcggatcggcgactggatcggccgccactgcgagcacgagcacgtctgctacctctacgccgacgcccacctgcctgcgctggacagcttcgacctgctggtggtgatgggcgggccgatgagcgtccacgacgaagcgcaatatccctggctggtggcggagaagcgtttgatccgcgcggcgctggatgccggcaagaaggtcctcggcatctgcctcggcgcgcagctgctggcccaggcgctgggggctgcggtacgcccgggacgccaggcggagatcggctggtggccgctgcacaggtacagccaggcgctgggctcgccgctgggcgagcgcctgccggaacggctgatggcgttccactggcacggcgagaccttcgacctgccggccggcagcgtgccgctctatggttcggctgcctgcgcaaaccagggcttcatctggaacgagcaggctatcggcctgcaatgtcacctggaaagcaccgcggagagcatcgaggcgctgctcgatgcctgcccgcaggacctgcaacgggaaggggcggtgcagagcgccgggaggatccgccagggtgtcgcgcattgccgcgaggtggcgccggtgctgttcctgttgctcgattacctggcgcatcggccggcggagatcgcacgccgggcctgatcgccagaaagattcctctgtcctcgcatgcgcctccggacgtcgttttggtcctgtggggcgctttttttattctaggctgcgtgctttcccaaccagggctccagtagtgccaggtcgcgacgcaggctttcggcgaacaggtgcaggcgggtggggttgtccagctcgccgggctggatgccgacgaaggtgaaggtttcgtcgtgctctcgggcggcgacattgatactgacggtgccgtcgtagtgcatccggcactggcagtcgtagccttccagcgcctggttcaggctgcgctggatctcgccgagatcggggtgcttgttcttgctcatcgcatcgctcatgcaaggggatggggctttcttctcgtgcagggcgagtcgggtggatgcgtcgacgacctcgggaccgaggggcggcgtagcctcccggccggcgcggcgtctgggcttcccgcccggacattgcttcctgtatcgccagggtaggggtgcctccgctatcgtttcgcgatgcaaatgcactagcaccgctagtgcaatcgtcacgcgtgcgcggtcagggcgggcgggcatccttgctgcccccggaaaatcgctccatccaagaggaacagcatgaacgaccaggtactgcgtacccagaccgaccgccgccagttgcagcagatcatcgccggccttaccgaaggggtgatcctgatcgagccggaccagcgcatcctctgggccaacgaggcggccctggcgatgcacggcgtcgattcgctggaaggcctgggcgccgataccggcgagtatcgcgagcgctttcgcctgcgctaccgcaacaatcatccgctgcaggaggggcagtacccggccgagcgcctggtggctggcgagtgcttcagcgacgtggtggtggaagtgtttcccgccgccgacgaggacacccgctgggtgcaccgcgtgcgcgggctggtgctgaccacccccgaggacaagcccgactgcctggtgctgatcctccacgacgccaccgagtgggccagcgccgagcagcgcttcgagaagaccttcaatgccaacccggcgccggcggtgatctgccggctcagcgactaccgctacgtgaaggtcaatgtcggtttcctggaaatgaccggctatgcccgcgaccaggtgatcggccgttcggtgtacgagctggacgtactcgaccaggccgagcgccgcgaactggcggtggagcgcctgggcgccggcgagaccatcccgcagatggaggcgagcctgcgggtggcggagggcggacgcaagtgcgtggtggtcgccgggcagccgatagaggtcggcgaggaggcctgcatgctcttcactttcaccgatctcgaaccgcggaagaaggccgaggaggccctgcgcaagagcgaggagcgcttcgccaaggccttccgcatggcaccggtgccgagcctggtgctgtacggcgacgacctgcaggcgctggacatcaaccaggccttcagcgaaaccttcggctaccaggccgaggaactgctcggcgagtccaccgtcgcctgcgggctgtggcaggacggcggcgccgagcgcctgggcgagctgctggcgcagagcggcagcgtgcgcaacgtccagctgcgcctgcagcacaaggatcgcaacggcctggactgcctggtctcggccgaggcggtgagcctcaacgagcaggactgcgtgctggtggccttgctggacatcagcgaccggcggcgcaccgaaatggagctggtgcacgccatcgagacggtgatgcaggacgcttcctggttcagccgcaccctgatcgaaaagctcgccaacgtgcgccgcgccaacgcaccgggcaccggcgccgaactggccgacctgaccgcgcgcgagcgcgaggtgttcgacctcatctgccagggcctggcggacaaggagatcgccaaggaactgggcctggcgccgaacaccgtgcgcaaccacgtggcgaccatctacgccaagctcgatgtccacagccgtggcgaggccatcgtctgggcacgcgaacgcggattcgcgccggagccgcgcaacggcaacgggcgcaaataaatgaagagggtacgaatgcaccagggtggctggtgcattcgtacctgtcgcccgctcccgtcggcgccgacactggcgcagcacgcccggcatgcccccgcccgtggtcgtgcaccttttctccgcggcgcgagccgcgccgtccgcacgtctgttcccctcgccagtttcgctctggcggggggcttcccgcctcctttcgaatatttgcccctctgcctctgctggtgcgcgacggcatcctgccggccgtttgcgaatgctcgggactggtgccgtgaaattttaagtgttatttttcatgaaaaataaacaatataatttcacggaggtcgcgatgttcctgcaatccaacgagcatgtcggcacttactacgccgccgtcaatcccgaactgatccagccgcgccaggccctggagggtgacctcgactgcgaggtgctggtggtcggcgccggtttcagcggcttgcacacggcgctgcggctggtcgaaggcggacgccaggtatgcgtcatcgaagccagccggatcgcctgggcggcctccgggcgcaacggtgggcaggcgctgcccggctggtccagcgacctgccgccgctggaggccgacctcggctacgaaggcgcacgccgtctctgggacggcatgctctgggcggccggcgagatgcgcgagttgccgcagcgacatggcttcgactgcgactaccgggtcggccacctatggacggcgatcctgccgcgccgggtcggcctgctctacgactggcaggccgaggccaaccgtcgctggggctacgaggggctacgcttcgtggcgaaggacgagttgcccgaatggatcgccagcgagcgctaccttgccggtctctacgatccccacgccgcacacctgaatccgctcaagctggcgttcggcctggccgccgccatcgagcgcgccggcgggcgtatccacgagcggacccgggccctgaactatcgcgaggagggcgacggctaccgggtccgtaccgagcacggcgagatccgctgcgcggcgctggtgctggcctgcaacgcctacatcgacgggctggacagcgagctgtcgcaacggatgctgccggtgggcacctatcaggtcgccactgagccgctcggcgaggaacgggcgaagtcgttgctgccgcgcaactgctgcgtgaccgacaaccagttcgtcctcgactacttccgcctgaccccggaccaccgcctgctgttcggcggcggctgcacctacctgggcggcatgcccagcgacatccgcgccgccacccggccctatctcgaaagggtgttcccgcagttgcgcggggtggcgctggagtacgcctggggcgggcatatcgactgcagcatgcggcgtaccccggacatcggccggcagggcaaccgctactggctgcaaggttactccggccacggcgtgctgccgagtctggcggcggccagggcggtcagcgacgcgctgctcggcgacgacgagaccctggcgctataccagcgcctgcgcaatccgaagtttcccggcggccagcgcttcgccgcgccgctggaagccctgggcaaagcgtattaccgtttgcgcgacctgttctgagagggcccggagccgagatgagcgaagtagccgacgacctggcggagatcgccagcctggtgcgcgaattgcgcaagcgcaagggcatcaccctgcaggcactggccgacggcattcgccgttcggtgggcttcgtctcccaggtcgagcgcggcctttcgcggccggcggtggacgacctggtcgccatcagccaggtgctcggggtgccggcgacctacttcttctgctcgccgaagatccaggcctcgccctgggtgacccgcccgggcgagcgtcggaccctggcctacgctcgtggcgccagcgacaacctggtatcgccgcgtctcggcggcgccttcttcatgctcgaaacctgccttgaagcgggtgccgacagcggcgagcgcgacctgctggacagctcggagcagggcggctacgtgctcgaaggcgagctgaccctgtggctggaggacgaggagctgcgcctgcaggccggcgacggtttccagattcccagccatatgcgcagccgctacgccaaccgcagccaggcgccggtcagggtgctctgggtatacgcctgacgaagcgcgttacccggtcgtttgccggatagcggcgaagacttccggcatcggcgagaaccgtcgccgaccgatgaaaaaagcccgaggcacaggcctcgggcttttcgtcaccagcgtccggaggcgccgccgccgccgctggagccgccgccaccgcggaagatgccgccaccgccgctgccgcctcccccaccgccgccgcgactattgaggatggcgctgaggatggccatcagcacttcgccgggaagcaggaacagggcgtagatgaacagggtcggcgccagtacgccgagactgtcgtccgccgcgcggtcgacgttctgccacaggcccatgctcaacagccaggccaggccggcgaccgccgcgctgcaaagcaggaagcggccgatgctgcgccgccgcatccactgcaacggcagcaggcgtccgagtagggccacggcgagcaggaccgccacatagacaccgaggtagaccggattgccccagagctgtccgctcaggccgctcttcttcttcggctccggcggggcgctgtcatacacctcaccctcgtcgaccggtgccggcagggcccgcggcggcgtggcctcgggaaccgccggcaaggcgtcgacgggagcgctggcggtagcgctgtccgggttcttctcggcatcgatcagttgcaccaggctgtccacgccggcctggatgccgccatagaagttgccctggcggaactgcggcgtgatctgctcgctgatgatccgcccggcctggacgtcggtgatggccccttccaggccgtagccgacctcgatgcgcagggtgcggtcgttcttcgccaccagcagcaggacgccgtcgtcgaccttcttctggcccagcttccatttctcgaaggtacgcaccgcgtactcctcgatggaatcgtcgccggtggtcgggaccagcagcacagcgagctgcgcgccgctcttggcttccagggcggcgagctgttgctccaggtgctggcgctggtcgccggaaagggtcgcggtgaggtcggtgacccgcgccgtcagcgcgggtatcggtggcacatcggcccaggcgaccaggctggcgagcagcagcccggcgcccagtagcagccggcgcatggcttactgcgccggttgcgggttgccgaaatcgactttcggcgcggtggagatggccgcttcgttttccacgctgaagttcgccttgggcttgtagccgaacagcttggcggtgatcacgccggggaactggcgcagcagcacgttgtattcctgtaccgacttgacgtagcggccgcgagcgacggcgatgcggttctcggtgccttccagttgggtcagcaggtccttgaacaggccgtcggccttcagttgcgggtagttctcggtgactaccagcaggcgcgaaagcgccgagctcagttcgccctgggccttttggaagcgctgcacggcctgctcgtcgtccagttggtcggcgttcagctgcacgctgccgaccttggcccgggcctcggtgacctgggtcaggaccgacgcctcatgggaggcatagcccttcaccgtgctgaccaggttgggcaccaggtcggcgcgccgctggtactggttgagcacttccgaccaggcggctttcacctgttcgtcgccggcctgcatggcgttgtagccgcagccgctgagcagcagggcgaggacgggaaggagggcatttctgaggaatcgaggcatggtggtactcatccgggttgagaaagctcgattgtagaccagccaatggccagcacgttccttgtgccggcacggatatcggcgctgtcaggcggtgcggcggccgaacgccagcttggccgccagggccagcaggcagaacacgaacagcgccagcgaccagaccgccatggactggccgagcagggtccagaccacttcgccgcacagcccctcgggctggaagacctgcggcagccaggtgtccagcggtatccattcggggaagcccatgaacatcttgcaactgcccatgccctgggcagccagtttctcttccgcgaccagcgaccaggcgtggtagatcccgcccaggctggcggcgagcatgcccagcgcggcgatgccgccggcgatccgcgaacgcggggcgaggctgccgacgatcccggcgagcaccaggccgagcacgtccaggcgaatgaagatgcacagcgagcagggcgcgaagccgcgcacgtgctggaggtagaggacgaaagcgaggatcagcaggccgccgatggcgaccgcgggccagaacaagcggttgtcgaggggcttgaggagagcgctcaaggcagggattcctgtgtcgttgataagggaggccgggccggcactgtgcggcgctggccgatggtagtccatcaggattgtccgaagattaagccgtttgacgtaacgatgtctgctgcatgtttctccgctttcgtaggagctttcagggaaaaacgccgcaacgaggcgagcatttggagcctccgccgggatagactatcctggtctataccaataaggcccgtcatgctagccaccagcctggtgctatgcgccgccgttctccacgccacctggaacaccctggtcaagttcagcagcgaccgcttgctggtggtcgcctgcatggacgtggtcggcgtgctctgcgccatcctgctgttgcccttcgtcagcctgccgccggccgaagtctggccctggctgctcggcgccaccgtcctgcaactgctctaccgggtactgttgatcgaggcctacaaggtcggcgacctgggcctggtctatccgctgatgcgcgggctgtcgccgctggtggtgctgggcctgaccctggcgttcggcggcgagcagctcagcggccggcagatcctcggcatcctgttgatccccttcggcatgctttgcctgctctggggcggcggcggttcgcggctgccctggcggaccctgccggtggtgctgctgatcggcctgtgcatcggcggctacacctggagcgacggcaacgccttgaagcgctggccgttggcgcttgactacctggtctggctgacgctgctttccggcctgccgttcccgctgatcgccgttggcgcgcgaacccgcgccttcgcccgcttctgggcgctggagtggaagctcggcctggcggtcggggtctgcgtgttggccagctacggcctggtgctgtgggccatgcagctggggtcgatcgccgaagcggcagcgttgcgcgagaccagcgtgctgctggcggtgctgttcggcatgcgcttcctcaacgagccgttcggactgccacgcctgctggcgtgcggcctggtgctggccggaatgctgctgatgaagctctgaaggggctgtgcctttacagaacgagcggcgccagcttgagttgcagttccacaactacaaggaactgccatgaccatcgctttctggtgcgtgctgatcgcgatcttcctgccttacgtctgtacctccatcgccaagttcggcggggagggctacggcggtcgggccaacgccgacccgcgggcgttcctcggttcgctcgaaggctttcgccggcgtgccaacaacgcccagttgaacgctttcgaagtgaccccggcgttcgccgcggcggtgatcatcgcccatctggtcggcaacgcttcgcaggcgaccctggatagcctggccattgcctggatcaccagtcgcctgctctacgtcatctgctacctcgccgactgggggccgttgcgctcgctggtctggttcgtcggcatgctgctcatcgccgcgttcttcgtggtttccgcctgagcagcccgctgcggcctatggccgcagtgcgggcgcgcggctctggatcaatcggcggtggcggcggataatccgccgcttccgtgatcgaccctgaaaaaagagccttgccatgaagctgaagtccctgctcgtcgtgctgctggccggcgtcgccctgagcggctgtcaccgtatggatcccaattcgcccgaggccaagcgccaggcgatcttcaaggaaatgctacggaccagcgaggacatgggcgggatgctccgcggacgcctgcccttcgacgcggagaagttccgtgccggatcggcgaagttgcaccaactggccgaccagccctggcagtacttccccagtcccaaggccggcgaggagggcgaggacacccgcgccaaggacgaggtctggcagcgccagcaggagttcaaggccgccacccaggtcttcatcgacgcgatgaaccgtctccaggacaacacccgccaggccacgccgaccccggatggcgtgcgcaaggacttcgccgcggtggaagacgcctgcgaagcctgccacaagaaattccgcgcgctctgaggccggaccgggcgttatacgccgtgcctggaaggcgcgaggggtagggcgaatgagcgctggcgctcatccgccgttgcggcagcgctgggcggcacctggtgtcccgctgcggcgcggatggcggataacaccatgggcgtcatacgccttgcgtgggaggcgcgaggcgtagggcggtacctggtgtcctactgcgcctgggcctgttccaggcctttcttggcctcttccagttcggcgcgggcctcggccagcttggccttgcgtttctcgatcttctccggatcgcccttgcccatggccttgcgcaaatccttctcgcgttcgctgacctcgcgctcgctgtcgatcaccttctgcttgttctccctcagcaggccggcttcggtgcagtgttccttgacctcggagagggccttttccaagccggccacctggccttcgttggcgaacgagcgggccgtttccagcttcgcctcgatggcggcctgcttggcggcgcaaccgctgagtggggcgcctttggcggcgcccggctgggcggcagagagcggcagggcgacggcgagcagcagcccggccagcggcagtgaaggacgaatggacatcggttggctccttgatcgaacggccggtgcggttgccggacgacggctcggccgagcgtcctggcaggcggatgaggcaggcggcagccggcgtgacaaaggcgcaagtgtgccagcaaacggcacggttgtggttgtccgggagcaaagtacgccgccccggggtctctggagaagggccatggttcgggcattccggcacaacccggcctaacgttgtccgaagacaccgagaacgggagaaccgcgatgcgtacgctgatccgcctggttcgcacgcttatcctgctgctggtcctggcgctgctcgccggcgcctggtggtggttgcaggacgaggccctgcgcccccccgcgctggccggccacagcgaggactcgagtctgaaggtcgcgggcctgcgccggcattacctgctctacgtgccgccgggcgtgtccgagggagcgccgttgctggtggtgctgcacggctcacggggcgacggcgcgcagatgcgccgcatcagcggctacggcttcgaccggctggcggcgcaagaaggtttcctggtggcctacccggacggcttcgagggccactggaacgattgccgcaaggccgccagctattcggcgcggctgcgtgacgtcgatgacgtggctttcctccgcgcgctggtggcgcggctggcccaggaataccgcgtcgattcgcagcgggtatatgtcgccggctactccaatggcggccagatggctttccgcctggccgccgaagcgccggggttgccggcggcgatcgcagcggtggcggcgagcctgccgaccacggggaacgatgcctgtcggccggtcgagcggccgaccgcggcgttgctgatcaacggcacgcgcgatccgatcaatccctatctcggcggcaaggtcagcctgttcggcttcggcgaccggggcgcggtacgctcgaccctggactcggcacgctggtgggccggcctgaacggcatcgcagcgccgccggacgtggcgccgctgacccgtcccggcccggtctggaccgagcgacagcgctggcaggaagacggccatccgccggtggagctgctcagcgtgcatggcggcggccacgtgctggcgcagccggactatcgcttcccgcggattctcggcaagagcgacccggaactggacgcgccagtggaaatctggcgcttcttcagccagttgccgcgctgaggctcagacctcgaagacgaattccggacggaacccgcctctctcgtggggatagccgcccggattggccagcacccgtgcccggccgatgcggtagtcgagggcgtcgtggacgtgaccgtgcagccagtagtcggcctgcgccaccagttcgtcgaggttggaagcgaaggctggcgacagtgggttgccgacgaactgcggcgggatcgacagcgcactgggcgcgtggtggctgaccaccagcgtcgggccgtcgtggggccgcgccagctgttcggcgagccagtcgcgcgaggcctggtgcagggcgatgctctgctcgggggtgaagtcgccaccgaaccagtcgatgcagctgaagtccggcatcgattgtagggccagctcatgggcgggtgcatagccgtccgcgccatagagctggaagtcggtccacagggtggcgccgaggaagcgcgccgggccgatccgcgcttcgtcgttttccaggaagtggatctccagcgcccgggcgatattgcgcatcgcctgggtcaggtcggtcatttccgaggagtagaactcatggttgccggcgacgtagacgatctcgctgtcggcgaaggtctcgcgggcccagtgcaggccttccaggtggctgtggatatcgccggccagcaccaccacgtcggcctcgacctctggcagttggcgtcgcccgtcgaaatgttcgtggtggaggtcggacagcaggcggatcttcatggcacggctcggcggtaggcgcggcggaccagcatagctccgcccaccccggggttgaaggccgacaacgattgacgcaggtcatggctgtgcgggaaaacctcgctggcctcgctaattcccccatgaagttaagggacaattaagactggacgcgcagggttcattccagcgattcgcgcgttctgtcggggagtggtgccaatgaaattgttatggggagttctcgccgccgcgctggcggcctggggcctgacgctggccgtcgatccgccggcgagcctggacatctgggtggtgcgcaagcaggcgatcctgcttaccggggtagtgtccttcgccctgatgacgttgatcatgctgctggcggtgcgtccggtctggctggagaagccgctggacgggctcgaccgcatgtaccgcctgcacaagtgggcgggcatcctggccatcgtcctcggcctgttgcactacctgctggagttggccggcccctggctggcgggtatcgtcggcaaaccggtgaaaggcccgcgggtggaaaccttcctcgatgtcttccgtggctcggccaaggagttgggtgaatggtcggcgtggattctcggcgggatgctgctggtcactctctggcagcgcttcccgtatcacctctggcgttatgtgcacaaggcgttggccctggtctacctggtactggccttccattccgtggtgctcgccccggccagctactggagccagccggccggctggctggtggcggcctgcgcactgctcggttcggcctgcgcactgttgtctctgagcgggcggatcggtcgcacgcgtcgccatgcgggcgtggtcaccgccgtcgagcggcacggcgaaagcctgctcgaggtgacctgtcggctgcagggcgactggtcgcacagggccgggcagttcgcctttctcacctgcgaccgcctggagggtgcccatccgttcaccatcgccagcgccgaccgcggctgcggcgaggtgcgcttcagcatcaaggcgttgggcgactacacccggcgcctgcaggacaacctggaggtcggcgccagggtcgaggtggaggggccatacggctgcttcgacttccgccgtggcctggccgggcggcaggtctgggtcgccgccgggatcggcgtgacgccgttcatcgcctggctggagtcgctgcaggccgcgccggaaagcgcgccatcggtggagctgcactattgcgtgcgcaattcccaggaagcgctgttcgccgggcgcttgcgcgagctttgcgaacacctgcccagcgtgaccctgcacatccgctatagcgacgagcagggcaagccgcaggcggcgcaactgggcgtgctgaagagcgccgaaggacgctggccgagcgtctggttctgcggtccgcaggggctggccgacagcctgcgccgcgatctgcgccggcagggcgtgccgctgcggctgttccaccaggaagccttccgcatgcgctgagcctgccggaaacgaaaaagccccgccgaagcggggctttttatcgcgcggtcgctcagaggccggcggcgtcgcgcaggagagcggccttgtcggtcttctcccaggtgaacgcggtgaaggtatcgccgtccacggtcagctcgaacggatgacgaccgaagtggccgtaggccgcggtcggctggtacatcgggtggagcaggtcgagcatcttggtgatcgcgtacgggcgcaggtcgaagtgctcgcggaccagttgcacgatcttctcgtcgctgaccttgccggtgccgaaggtgttgatcgagatcgaggtcggctgggccacgccgatggcgtaggaaacctggatctcgcaacgctcggcgaggccggcggcgacgatgttcttcgccacgtagcggccggcgtaggcggcggagcggtcgaccttggacgggtccttgccggagaacgcgccgccgccgtggcgggccatgccgccgtaggagtcgacgatgatcttgcgtccggtcaagccgcagtcgccgaccgggccgccgatcacgaagttgccggtcgggttgatgtggaactgggtgtccttgtgcagcagctcggccggcagcacctgcttgatgatcagctccatcacgccgtcgcgcaggtcgttataggagacttccgggttgtgctgggtggacagcaccaccgcatcgatgccgaccaccttgccgccttcgtagcggcaggtcacctgggacttggcgtccgggcgcagccatggcagcaggccggacttgcgcgcctcggcctggcgctcgaccaggcggtgggagaagcagatcggcgccggcatcagcacgtcggtctcgttgctggcgtagccgaacatcaggccctggtcgccggcgccctggtcttccggtttggcccggtcgacgccctggttgatgtccaccgactgcttgccgatgatgttcagcacgccgcaggtggcaccatcgaagccgacgtcggagctgtcgtagccgatgtcgatgatgaccttgcgcaccagctcttccaggtcgacccaggcggaggtggtgacttcaccggcgatgatcgccacgccggtcttgaccagggtttcgcatgccacgcgagcgtacttgtccttggcgatgatggcgtccagcaccgcgtcggagatctggtccgcgatcttgtccggatggccttcggacacggactcggaggtgaaaacggaatattcgctcatcaatcggttcctacattaccggtgggtgaggcggctttcggatgcatccctggcgaagtgccggacctggatctggaagccattgcgtaaaccaatgtaaagactctcgccgggcgtgagccctgcggcgtcggcccactgggccaggtcctcctgttcgaaacccaaccagaggtcgccgcaggcctccctggcccagccctggttgtgccggcacaagtccgtcaccagcaggctgccgcccggatggaccaggcgggccaactgtttcagcgcctccgccggcgcggcgaagtggtgcaggaccatgttcagcaccacgcaatcggccggttcggcggcgtcctgcagggcatcggccaattccaggcggacgttgcccaatccttcttccttgcagcgctggcgcgccagttccagcatcgccgcgctgttgtccagcgccgtgacctggcggaaacgcctggcgagttccggcaggaatccgccgtcccccgggccgacctccagcgccgtggcgccgggggcgaaggccagtgcgtcgagcaaggccaacacgctctcacggtattgcggcagtcctgcgatcaggtcctgctgggcctggaacttgtccgccgcgcgggcgaagaagtcctggctgaccgccgcgcgctgggcgtgcacggcatcgatccgcgcccgcacgtcgtcgggtagcgcccgttcgtccacttcctccagcagcgccgcgtgcagcgcgccgccggtgcgttcggccaggggcagcgaacgtcggtagaagatcgcgttgccctcgcggcgcgtcgccaccagcccggcctgggccagcaccttgaggtggtggctcatgcccgactggccgatggcgaagatctgcgccagctccagcacgccgaacgaatcgttggccagggcgcgcaacacattcagtcgcagcgagtcgccagccgccttgcacagcgcggcgagcgggtcgtagtcgtctggtcgtatcgaaggcacgcgaaggctcatggaggcgcagtctagtaccgggtccgaaccccggcaatgcctgtatcaaaaatttttgatattgatgacgggtggccgtcgcgcaattgcaatccggctgcgccaggcttctggcaaaaccggtcggcagcgacatactgtccccctgccgatctgtcattgccccttgggccttcggtgggcgaaaatggcgccctttttttcactcctggttttccgaccagcaacccccgtaggagaattgcgatgcccagccgtcgtgagcgagccaatgccatccgtgcactgagcatggatgccgtgcagaaagccaacagcggccacccgggcgccccgatgggcatggccgatatcgccgaggtcctctggcgcgactacatgcagcacaacccgagcaacccgcagtgggccaaccgcgaccgcttcgtgctgtccaacggccacggctcgatgctgatctactccctgctgcacctcaccgggtacgacctcggcatcgaggacctgaagaacttccgccagctcaactcgcgcaccccgggccacccggagtacggctacaccgccggcgtcgagaccaccaccggtccgctcggccagggcatcgccaatgcggtgggcatggcgctggcggagaaggtcctggccgcccagttcaaccgcgacggccacgcggtggtcgaccactacacctacgccttcctcggcgatggctgcatgatggaaggcatttcccatgaggtcgcctcgctggccggcaccctgcgcctgaacaagctgatcgccttctacgacgacaacggcatttccatcgacggcgaggtccacggctggttcaccgacgacaccccgaagcgcttcgaggcctatggctggcaagtgatccgcaacgtcgacgggcatgacgccgacgagatcaagaccgccatcgataccgcgcgcaagagcgaccagccgaccctgatctgctgcaagaccgtgatcggtttcggctcgccgaacaagcagggcaaggaagagtgccacggcgcgccgctgggcgccgacgagatcgccgcgacccgcgccgcgctgggctgggagcacgctccgttcgagatcccggcgcagatctacgccgagtgggacgccaaggaaaccggcgccgcccaggaagccgagtggaacaagcgtttcgccgcctaccaggctgcccatccggaactggccgccgaattgctgcgccgcctgaagggcgagctgccggccgacttcgccgagaaggccgcggcctacgtcgccgatgttgccaacaagggtgagaccatcgccagccgcaaggccagccagaacgcgctgaacgctttcggcccgctgctgccggagctgctcggcggttccgccgacctggccggctccaacctgaccttgtggaagggctgcaagggcgtcagcgccgacgacgccgccggcaactacgtgttctacggcgtgcgcgaattcggcatgagcgcgatcatgaatggcgtcgccctgcacggcggtttcattccctacggtgcgaccttcctgatcttcatggaatacgcgcgcaacgccgtgcgcatgtccgcactgatgaagcagcgcgtgctctacgtgttcacccacgactccatcggcctcggcgaggacggcccgacccaccagccgatcgaacagctggccagcctgcgcctgaccccgaacctggacacctggcgcccggccgacgcggtcgagtcggcggtggcctggaagcatgccatcgagcgtgccgacggtccgtccgcgctgatcttctcccgccagaacctgccgcaccaggcgcgcgacgtcgcccaggtggccgatatcgcccgcggcggctacgtgctgaaggactgcgaaggcgagccggaactgatcctgatcgccaccggttcggaagtcggcctggccgtgcaggcctacgacaagctcagcgagcagggccgcaaggtccgtgtggtatcgatgccatgcaccagcgtctacgagcagcaggacgagtcctacaagcagtccgtgctgccggtggaagtcggcgcgcgcatcgccatcgaggccgcccatgccgactactggtacaagtacgtcggtctcgacgggcgcatcatcggcatgaccagcttcggcgagtcggcgccggccccggcgctgttcgagcacttcggcttcaccctggacaacgtcctggcggtggccgaggagctgctggaagactgatgcacacgctctactggcgggacctcgaaagccccgccaatggcgaatggctgggcctcgtggtccaggtggagggcgcccatcgggcgccctctttccttcatctgcaatccggcggccaggcccgcattcgcctgatgcgtggcgatcagccgctgctctgggccacccagttgccgtaccacgatggcatctggctggtgaagagcctggtcgcggcgagcccggcgcaggccagcgtgccgcccatcgactcgccgaccctggaagcgttgcgcggcctgcgcggcgaggcccgctacaaggcctggagccgctatttcgtcgagaccctgcgtaccagcccgggcagttgcctggaggccgggcgctggttgctgcgcctgtcgctcgccgagcaggtgcccgcctggcagccaccgcagagccacgatccgcgcgaacgggtgctggaacgctggcgctaccgcagcgtcgggcgcgacgcactgttgccggactggcgcttctacagcctggagaaggtcctcgacgacgactgggtgcagtggctcgactggtgggggcgcgacaacgacgccctgatcgccctgcgccgggtcgaggatgacgaggggcgggtcaagtggtggcgcaagaaggcccgcgaaggcgagctgccgccggtgctggcgctgcgcctgaactgcctggatgcctgcgtgatcctcgatggccactgccggctgcgcgccggcctgctggagaacgtcgcgccggagatcctggtgctctgtgcctacgacgagcagccgatgccggtggatacggcgcagcgcgaacgggtgctgcaatcgctggcgcagcgggtcgacgcgccggtgcgccgtggacgccggccgctggatagcgaacagctcaaccaggtgctgctgcgcctgttcgacgaccgtccctggccgcgagtgctgacccgtgcccgcgcggtgctgaaggaagaacagtggtgcgcggaagtgcgcgactggctggccgcccgcgagcgtctggacgcgctggagccgatcatccgtcgcgtcgagtagcgcgccagcgccgcagccattccaggcctgccgaggtgtcgccgcgcggacggtactcgcagccgatccagccctggtagccgagccggtcgagtagctcgaacaggtaggggtagttcacttcgttgtcgtcatccggctcgtggcggtcgggtaccccggcgatctggacgtggccgatattgccgatgtcgcgacgcagggtggtggccaggtcgccctcgacgatctggcagtggtagcagtcgaactgtacctgcaggttgtccgcgccgacctcgcggcagatggcctgggcgtcgtcctggcgggtgaggaagaagcccggcatgtcgcggttgttgatcggctctatgagcaccgtcagcccggcgccggcggcttcgcgggcggcatgggcgaggttgtcgaggtaggtctcgcggtggcggatgcggtcggcgccggccggcagcagtccggccatgacatggatgtggcggttgccgaggccttgggcatagtcgatggcctgggcgatggcgcggcggaattcggcctcgcgccccggcaggctggccaggccgcgctcgcccttgtcccagtcgccgggtgcggcattgaacagcacctggcgcaggccgtggtcgtccagccgggccttcagttcggccgcagggtaggcataggggaacaggtactccacgccctcgaagccgtccgccgcggcggcggcgaagcgttcgaggaagtcgtggcgggggtagagcatgctgaggttggcggcgaagcggggcatctggcgctcctggcggtcggtggatgcgggcgagccttgcacaacggaacgcggtcgcgccagccaggtgtcgcatgaatcgtttcagcgcctgcacgcgagccgttgccgcggcgcacgccgcgccgcgcgggtcgcggacggttcccaggcgggcccatcccccgcataattggcgcctttcactggccccttgccggagctatccctgccgatgtccaccccgccttttcgcgtcgcgctcaatggctatggccgtatcggccgctgcgtcctgcgcgcgctgcacgagcgcccggagcaactgggcttcgagatcgtcgcgctgaacgacctggccgaccaggccagcgtcgagtacctgacccgcttcgactccacccatggccgctttcccggcgaagtgaaggtcgacggcgactgcctgcacatcaacggcgattgcgtgaaggtgctgcgcagcccgactccggaggccatcgactggcaggcgctgcgggtcgacctggtgctggagtgctccggccagtacaccaaccgcgcccaggccgagcgtttcctccgcgccggcgcgccgcgggtgctgttctcgcagccgatggcgagcgaggcggacatcgacgccaccatcgtctatggggtcaaccagcaggacctcagcggccgcgaaacgctggtctccaacgcctcctgcacgaccaattgcggggtgccgctgctcaagctgctgaacgaggcgatcggcctggaatacgtgtcgatcaccaccatccactcggcgatgaacgaccagccggtgatcgacgcctaccaccatgaggacctgcgccgtacccgttcggcgttccagtcggtgattccggtgtccaccggtctggcgcgcggcatcgaacgcctgttgccggaacttgccgggcgcatccaggccaaagccatacgcgtgcccacggtgaacgtctcggcgctggacatcaccctgcagacttcccgcgacacctccgccgccgagatcaaccgggtgcttagcgaggctgccgaaagcggcccgctgcgcggactgctggcttataccgagctgccgcacgccagttgcgatttcaaccacgacccccattcggccatcgtcgatggcagccagacccgcgtttccgggcctcgcctggtcaacttgctggcctggttcgacaacgaatggggattcgccaaccgtatgctcgacgtcgccggacactacctgcgcgccgccgtgcctgatcaacaagtacccaaggactgattgtcatgaccgtgttgaagatgactgacctcgacctcaaaggtaagcgcgtgctgatccgcgaggacctcaacgtgcccgtgaaggacggccaggtgcagagcgacgcacggatcaaggccgccctgccgaccctcaagctggccctggagaagggcgcggcggtgatggtctgctcgcacctgggccgtccgaccgagggcgagttctccgccgagaacagcctgaagccggtggccgagtacctgtccaaggccctgggccgcgaagtgccgctgctggccgactacctcgacggcgtcgaggtcaaggcgggcgacctggtgctgttcgagaacgtgcgcttcaacaagggcgagaagaagaacgctgacgagctggcgcagaagtacgccgcgctgtgcgacgtgttcgtgatggatgccttcggtaccgcccaccgcgccgaggggtcgacccacggcgtggccaggttcgccaaggtcgccgccgccggcccgctgctggccgccgaactggacgcgctgggcaaggcgctgggcaacccggcgcggccgatggcggcgatcgtcgccggctccaaggtttccaccaagctcgacgtgctgaacagcctggccggcatctgcgaccaactgatcgtcggcggcggcatcgccaacaccttcctcgccgcggccggacacaaggtcggcaagtcactgtacgaggccgacctggtcgagaccgccaaggccatcgccgccaaggtcaaggtgccgctgccggtggacgtggtggtggccaaggaattcgccgagagcgccgtggcgaccgtcaaggccatcgccgaggtcgccgacgacgacatgatcctcgacatcggcccgcagaccgccgcgcagttcgccgagctgctgaagacctcgaagaccatcctgtggaacggtccggtcggggtgttcgagttcgaccagttcggcgagggcacccgtaccctggccaatgccatcgccgatagcgcggcgttctccatcgccggcggcggcgataccctggcggcgatcgacaagtacggcatcgccgagcggatctcctatatttccaccggtggcggcgcgttcctcgagttcgtcgagggcaaggtcctgccggccgtggaaatcctggagcagcgcgccaagggctgacgcagacggggcaaaccattcgccgtcctcgggggtcacacctttgaggacgacgaaaaaaggaggtgccccatgcgttccgtaaccttgccactcctgatgttctgcctgggcctggccgcctgtagcggcgatggcggtcgacgcccgagcacctgcgaggtgatcagtccgccggacgtgatggtgccgaccgagcagaaccgccagcgggtcgagcagcagagcagcggcgatccgaccgccggacaaaagccggtggaatgcccgtagtgcttttctgccagtttctacggaaagggctggggattcgccagcgtacgcagtagcattgcgcctttcctgtgacaggcaaggccagccggccgccgcgcgggccgcttgcggcccggcgaggtgcggcggagcgttccgcacggatggaggatggacatgaactactcgcgtatcgccctgttcggcggcttcgccgccgcggcgctgctggccggctgctccgcttcctccggcaagccgggcggcaaggactggacccgctggacctgcgacagcaaggcggtgatcgaatggcgctatatcgacggcagcaagaacatcgtcgacctgcgcctgaaggacgaggacgacgtggtccaccacctggagcaggaacctgcggccgtcggcgctttctatagcgacggacgcctgggcttccacctggagaacgacgaaggcctggtgtactgggtcgaaaccgacgacctcatcggtcgcggttgcaaggcgcgctgagtcgcgccggcaggggcgcggcgccgcgaccgctcctcgcaaggaacttgaaccgggcctgcccctgcggcaggcttctgaatcactgaacgaccccgcgattgggagatacgagaaccatggcactcatcagcatgcgccagatgctggatcacgccgccgaattcggctacggcgtgccggccttcaacgtcaacaacctcgagcagatgcgcgccatcatggaagcggccgacaagaccgattcgcccgtgatcgtccaggcttccgccggtgctcgcaaatacgccggcgcgcccttcctgcgccacctgatcctcgccgcgatcgaagaattcccgcacatcccggtggtcatgcaccaggatcacggcaccagtcccgacgtctgccagcgttccatccagctgggcttcagctcggtgatgatggacggctccctgcgtgaagacggcaagacccctgccgactacgactacaacgtccgcgtgacccagcagaccgtggcgttcgcccatgcctgcggcgtgtccgtggaaggcgagctgggctgcctgggttccctggaaaccggcatggccggcgaggaagacggcgtcggcgcggaaggcgtgctggaccacagccagttgctgaccgatccggaagaagccgccgacttcgtgaagaagaccaaggtcgacgccctggccatcgccatcggcaccagccacggcgcctacaagttcaccaagccgccgaccggggacaccctgtcgatccagcgcatcaaggaaatccacgcgcgcatcccggacacccacctggtgatgcacggctcttcctcggtaccgcaggactggctggcgatcatcaacgagtacggcggcgagatcaaagagacctacggcgtgccggtcgaggaaatcgtcgagggcatcaagtacggcgtgcgcaaggtgaacatcgacaccgacctgcgcctggcctccaccggtgccatccgccgcttcctggcgcagaacccgagcgagttcgacccgcgcaagtacttctccaagaccgtcgaggccatgcgcgacatctgcatcgctcgctacgaagccttcggcaccgccggcaacgcttccaagatcaagccgatctccctggaaggcatgttccagcgctacgctcgcggcgagctggatccgaaggtcaactaagcgccttcgttcgaacgggagccccgctggtcggggctcttgcacatccgccccggggaaatccgatgcgccgctggctcctgaccctgccgttcctgctgctggccggttgcgctggcctgcacgcgccgtcccgcgacgtcgaggaggccgcgtcgccgagcgtagcgcgcgatcccgccgacccgcaggattgcctggcgcgcagcgactgcaccaccaagacttcgcgcaccctgctgttcgtcttcgactatgcagaggccggcggcgaactggtggtgcgcgacgggcgccaactggaaaccccgccggcgccgcaacgctccacctggccggcgttgcgcatccaactggccgagccggtcaacggtcgcttcgagttcgagagcccctgcctgcgcaagagcggcaagggctgccgctacagccaggctacgctgctgaaggtctaccgcagctacctggtcggcaagccctgctcgctgctcagccctcgcgcagtgaaacgctgcgtcgacccggcggcgaccgccgcgcggcgctgagtcagggctgcaggtcgaacagcgccttgccgtccatgtcgaacggcgccgagaaatgctcgtggatcaccttccagccgtcgccgtgcttgcggtagccggcgctgacccgcatccacgaggagtgcggctggccgtccgggccggtgccgccgcagtggcagaggtagtgggcgaaggcgacctgcgggtcggcatggatctgcagttcggcgatatcgaaggtcatcggtcctttgcacatctcggtgcaggcctgccagtgcttctggtaggcgtcgcgccccttgaattgcaattgcaggatggcgtcgaaggcgacgatgtcctccgcgtagtacgagacgatgcgcggaacgtcgctggcgcggacggcggctcgccagtcttcgatcaattggcggatggcgctgacttcgctgctcatggctgactcctggttgtggcgggggacgccggcgtgtgccgggatgcttttaccctggtcgtcgggtgggccttcggatcgacaatagcctcttccccgagaggtccacgaagcccctgaccaatggctgcgagccacgccgcgcaaggctttgaaccgttcgtctggaattcgtgggaaaaccgctgtgctatacctcgggctttccctgccgcccaggaggtccctcatgtcgtccgtacacagcgccgcccagcaaggtttcagcgccgaggcccagcgttacgcccagggccggcccgagtacccggaagcgctctccgactggctgcgcgatgcccttggcctgcgtccgcagaccgtcgcggtggacctcggcgccggcaccggcaagttcacccgcctgctggcccgtaccggcgcgcgagtggtcgcggtggaaccggtggatgcgatgcgcgcccagctcgccgaagccttgccgcaggtccaggcgctggccggtagcgcccagtcgattccgctggccaacggcttcgccgacgccctggtgtgcgcacaggccttccattggttcgccaccgtggaggcgctggaggaaatgcgccgcgtgctgacggcggaaggcaggctgggactggtgtggaacgtgcgtgacgagtcgctggattgggtcgccgagatcacccgcatcatcaccccctacgaaggcgatgcgccgcgtttctacaagggcgactggcgtcggccgttcgagcgcgcgcccttcggaccgctgcgcttgtccaccttcgcctacgagcatgtcggcccgccggagcaggtgatcgtctcgcgcttcctttcggtgagcttcatcgccgccttgccggagacggaaaagaacgccgtggcggcgcaattgcgcgagctggtcgccagccatccggcgctcaaggggagggagcaggtagcgctgccctatcgcaccgaggcctatctggccgaggcgcgctaggcgtactgccccgccgcataacccgaggcccaggcccactggaagttgaagccgccgaggtggccgctgacgtccagtacttcgccgacgaaatacagccccggcgagcgctgcgactccatggtcttcgacgacacttcgtcggtgctcaccccgcccagggtcacttccgcggtgcggtagccctcggtgcccgagggcgtgacccgccaggccgaaagctgcccggcgatacccgccagttcggtcggggtgtactgcttcatcggcttggagaggaaccagcggtcggccagcagtccggcgagcttcttggtgaacagctcggcgagcagggtcttcagctcgctgttgggacgctcgcgctgttgctgcgccagccattcgctggcgtcgtggtccggcagcaggtcgatttccagggtatcgcccggttgccagtaggaggaaatctgcaacatcgccgggccgctgaggccgcgatgggtgaacagcaggttctcgcggaacacttggccgttgcagctcacccggcaatccacggaggtgccggaaagctcggcgcacagctccttcagctggtcggtgatggtgaacggcaccagcccggcgcgggtcggcagcacctcgtggccgaactggcgcgccacctggtagccgaaaccgctggcgccgagggtcgggatcgacaggccgccgctggcgatcaccagcgactcgcagcgcatctcgccggcgctggtacgcaggtggtagccggcgtcgtcgcgggcgatctcttcgatcgaggtgtccagcaggatttccgctccggcctcggcgcattcgcgcagcagcatctcgaggatgtcgctggacttgttgtcgcagaacagctggccgagtttcttctcgtggtacggcacctggtgcttggccaccaggccgatgaagtcccactgggtgtagcgggccagcgccgacttgcagaagtgcggattgcgcgaaaggaagttggccggctcggtgtacaggttggtgaaattgcagcgcccgccgccggacatgaggatcttcttgccggccttgttggcgtggtcgagtacccgtacgcggcgcccgcgtccggccgccgtcatcgcacacatcagcccggccgccccggcgccaacgatcagcacatctgtacttgccactgtcccactccgctcatcggaaacggcgcgcatcttacccgaagcggcggtcggccgccggagctcccgacgcggtacactgggcgttttccgcgaaccgccggacccgtgcatgatccccctcaagtacctccaggcctatcccgcatcgctgcaggaccaggtccgccagctgatcgccgagaaccgcctgggcgagtacctcgagcgccgctacccggggcgtcacgatgtgcagagtgacaaggcgctgtacgcctacaccatgaacctcaagcaggaacacctgcgcaacgcgccgggcctggacaaggtgctctacgacaacaagctcgacgtggtccagcgtgccctcggcctgcacaccgcgatctcgcgggtgcagggcggcaagctcaaggcgaagaaggaaatccgcgtggcttccctgttcaaggacgccgccccggagttcctgcggatgatcgtcgtccacgaactcgcccacctgaaggaaagcgagcacaacaaggcgttctaccagctctgccagtacatgctgccggactatcaccaactggagttcgacctgcgggtgtacctgacctggaagagtctctgacgcccggttacggcgttcccagcgccactcggctctcgcggcgcaggcgcgccacggtctccggcagttcgcgcatgtgctcgacgatggcgatggcgcccagctcgcgcagtacctgggcgtgcccggcgggaatgtgcccggcgccgacgaagccgatcacccgcatccccgcggcgagggcggcgcgggtgccggtgctgctgtcttccaccaccaggcaatgctcgggggcgacgccgagcaggctggcggcgtgcaggtagacgtcgggtgcgggcttgggcagggcgaccatatcggcgctggccaggcgttcgccgatcagttcgctgagcccggcgcgcgccagcgagcgctccaggctgtggcggcggctgttggaggccaccgcgacgggcaggtccagggccagcagcgcctcgcgtgcgccgggaatgggttggacctgggcgaccatctcctcgctgcgctggcgcacctcgcggttgaagctgtcggggatgcgcaggccgaagtgcttctcgacgcgatcgaggatgtcgcggctggtcaggccgaaggtgccttccagcaggcgctgcagctcctccagcggcgcgtaggcgctgagcgcctcgtacatcacgcgctcggcgatgacctcgctgtcgaccaggacgccgtcgcagtcggaaatcagtgcgtcgatggggtggggcatgggctacctcgctgcgggcgttggcgcagggcgccggagtgggagcgaggcattctaaccccggtcaggggcgggaagggaaacagggagagggagaacgccgggccgtgcggcccggcgggaaggaatcaggcgatgcccttcgggttctggccgtactggttctggccggcgtcgctgtccttggccagcaggtagatcaggtacaggccgacgatcgggatcagcgcgatcagcatccaccagccgctcttgttgatgtcgtgcagacgccgggcggtgacgcccagggccggcagcagcacggcgagcgagtagagattggcgatcggcaggagcttttcactgatcaggccgagcacgacgctcagcgcgacggagatgatgatgttcaccagggtgaacatccagtattccttgcgacgggcacgcccgttgaagtcgaagtagtgttccttcacgcatttcagaaaccattccatgtttgcctcctgggcgtactggtaaagcgggagagtgggtgccgcgacaagtacccccgcgcctccttgccgggaaagcacagtgtagccgtactgtcagtgaattcgtacaggatgttgcgaaaatcattcacattgcatagcagcggatcgccgaaatgtgcgccggtagcgctttcagcgagcggagtcggcctggcggcggaaacggcccggcgattcgccgaaggcctggcggaaattgcgggaaaacgccgcctccgactggtagccggtctcggcggcgatatccagcaggctcttctgcgtttgtcgcagcaggccgcgagccttctccatgcggatgcgggtcagcaggttccacggcgaggttccgccgagggcggagaaggcgcggacgaaactggcccgcgacatcgccgcctgctgggcaagctgttccagggtccaggcatgctccgggcgttccagcatggcccgcagggctcgtcccaggcgggcgtcgcccagcaggccgaacaggccgtggcccagcggttggcggtccaggtaggcgcgcagggccagggcgaacagcgcggtggccagcgcgtcgatgatcgagcgggcgccgctgcgggtgctctcggcttcctcgcgcatcaacccgatcagcgcgcgcaggggctgctgggtcgactcgtccatatgcaccagcaggcgctcgggaagcgcgccgaacaggctggcaccggcgtgatagcggtagctgccgcaaagcatgtcgagggcctcgccggggccgttcaactggtacagcgggatgctgccgcggtgctctacggtgggttcgcagggttgcgccgggctgtcgctgcgcaggaggtgcggggtgccgcgtggcaacagaatcaggtcgccgggatgcaggtcgaggcgaccgccatcgaggaattcgcaatagcaggtgccggccatgacgatatggaaggtcgcctcgccgggcaccgcttgcgggtgctccagcgcccagctgccctgtagctggcagcgctggtcgaggcggccctgcaggttggcgagctggatgagccggtcgagtgggtccatgggatgagccgatcaggtcgaaagtagagacgcatgggcaggcggcgcggtccagactggtcgagactggtaacccgacgcgccactcccggcgcgaaagcaacggagaatatcaccatgctgaacaactggaccgagttcgtccccgccgtgaaaaaagccttcggtgccctgggcaagcaacacccgaagatgctcgccgcctatggcgcgctggaggaagccagcgccgagggcgccctggatgccaagacccgcgaactgatctccatcgccgtggccattaccacccgttgcgacggttgcatcggcgtgcacaccgaggccgcgctgaaggccggcgccagcgaggcggaaatcgcccagaccctggctaccgccatctccctgaatgccggcgccgcctatgtctattcgctgcgcgcgctggaagcctacgaccagttcaaaaagtgaggccgtacaggcgctgcaggtagaacagcaaccccagccaggccaccagggccagccagcccagccccagcaggcccttgcgcagcagcgtcgagggcctgccatggagcaggtcgaccaggctcagcatgccaccgagcaacagcaggccgagcagcgcctgggtgtactgggcgaaactcggcgacaacgcctcgtcgccgtgggcggcatagttgtacaggttccaggcgcagatcagcgccgccggcagcagcgccagcagcgcgccgagccagcgcccgcggacatgcaggaggaagcccgcgagcaggccgaccagcccggtacccagcggtagcagcgccaggccctggctgaggtagaccaggtcgacgccgtcggcgagcgccatcggggtgacgaaacggtagctgccgctggcgcagagcagcaccgaaagcagcaacagggcgtagcccggcaggtacggccagaaggcgggacgcgggggcaggtcggacatggatgttccttgcgggttgtccgctcgcatgagcgtaggctcaagcgtaccgctgcgcgtgacaggcggcgagtaccgttgcggttgaaccctccgcgaatggcgggagtcagtcatagggtgacgcgaaaaaacgccggctcacgcgccggacaccgtatcgaccctggaccaaggagttccgttcatggacctgatccgcatcctcatcgccatcctcctgccgccgctgggcgtgttcctgcaagtcggcttcggcggcgccttctggctgaacatcctgctcaccctgctcggctacatcccgggcatcgtccacgcggtgtacatcatcgccaagcgttgaggcccctgctcaggcgtagttccatggttccttcacggtgaagtcccgccacgggtcttcgccgtggaaggggccgacatagagcacctcgccgccccggacgatccattccataccgtgttcgcggtcccattcgcagttcagcgacaggtggatcaccgcttcgtcgccctgttccgggtcgggcacgatcagctcgcccggctcgatccgttccagcaccccgcgcgccggcgcgacttcctccgcagactcgcccagccgccccaggcgcgcggcgcggtagcgcaggctggcggcacaaagccgctcgatcacggcgtcatccagttcgtcgagggctcgggcgcagcgccaggcgtaggcgtcgtcggcctcgttctcgatgaacaggctgatgtagcgccggtacaggcgccaatacacttcgcccatgttcgcatcgtccaggttgcggatcagttccatgcgtggtctccctgttcagcagcgttcggtgagggcgatgccacggccgtcgccgaagccatcgtgtacgtgcagccacagcgggatcggccaggcccagccgccggccttccaccagcactcggcgaaccaggcttgcagcgtatcggcgagcaggtcgacgccgccgaagccgtcggcgaagtaggcttcgtcgaaatccggggcatgtcccaggccgagcgccaggtccagcgccttgccgggaaacaggcgcgggtcgctggcgtcgacccggttgttggcgccattcaggtacaaccacgcttccgctgcgtcgcgtccgtcctcgccgaggaacaattggatctcgccgtcgcgcagtccttcctccaagggttgccggagcagctcgcgcaggcgctggatcacgcccggcgcggcgcgttgcaggtcgcggcggtagcgctcgcggaattgttcggggctgaggccgaaaggaatcatgggcgtttctccgtcattcgggcaggcagggcccggcttccagccaggcctccaggctgggtgccaggggttcgaagcagtccggcgtcatcgcgccatggtcgaccaggaacagcgcctgccggtgatcgtccagggccatcaccacggcgcggccgccgctgtcgtcgcctatggccaggtagccggggcagtagagagaggtttcgaaggcccggttgcgttccagcaactcgtcggcggcgtagagcagcaggcccggctcgacgaggcggccgccgtgctgctccagagcggcgacgaaggcagccggcagcggtcgtccgagccaggcctctagggcatccaattcaggcttcatcgggctcgtccagggcgaacaatgcatggtggcgggcatgggccagcaggcgttcgcccagcgcgtcggccagggcgtagaagcgcgtgtccagcgcatccagggccgcttcgcagtcgcggtcgggttcatcggcccaggtcggcatgcgcaattggcgttcggcctgggagactggcaccggaccgtcgccgaacagcagggcggcggctcgctccagcagggccagggcgtcctccgcctccaattcgcgaagacccgcgcgcgccgcctggtactggtcgccggaggagttgccgaagtactggtcgaagccgccgttgtgcacttcgccgctgagcacgctcactgcgtagtagctccgttcggccggcgacagcccggcgaatccctcgcggccatcgtagacgcgattcaccagcgcgctccagtacagcgcctgcggactcgccaggtagcgccgtcgctccgcgtggaagtgcttgccatcctcgatgttctgccggtagccgcccttgcagggcatgcacagtccgtcgtttctcgccgccgtggtcgggagaatgagatggccgcaggcgcggcagggaaggcggtcggtcatgagcggtccttgctggtggaaggggctcattattgcgcaggatcgttcagcttgaacgacagtttggcttgccagcctggcacggcattgcccgctggcatgaccgaccctctctcccttcggggagaggggcatgaggaccggcgcggagcgagaagcatcaccccgcgccagccccctcagctacgactcacggaaacggccacgccggcgacccctggctcatgtccagaagcttcaccgtgctgtattcgttggtccggttgttggcatagaagaacgccggctgctcggcgaaaccgtaggccgccacctgcgcctgggccgctgccgaggtacggatgccccatagcgcgaaggttggccgctggtcgcgctgggtcagccaggacaggccgagcaacaggttgtcgttgccgtccgtgctgctggcatcgccgctgtttcccgggcgctgggcgtaggtgccgtagccgagagcggccttgttggcgtcccagtcggacttgtccacctggcgctggtgcaggtagagcagggtccagatgtcccaaccctgcagcggatcgttcttcaggtcggcccagtagtgcacccactgggtatagaaggccatccgctcgccgttcagcgcgtaggtgcccgggtcttcccacaggcgcttgtatacgcctgccagcggatcggcctcggcgcgtccggcgacgatcaggttgtaggcgttgcggtagttgacccgcgtatcgtcgaggttctgcccgaactcgcggagcacgcgccagtccttgtgcaacgggaatatctggttggagatttcgcccgagcgcccgccgtagaccttcagtcgattcacttgcaggttgtggcccagctcatggctttcgccccagccacgcgggttcaggccccaggtctggtcgtaggggttgccgctgcaaccgccgccgcactgggcgtactggtcgacgttgatgtgctgggtgccgggcagcttgtgtagggtctcgctgtcgcagtcccagccgcgcgccgcgcattcctgctggattgccggagtcttcgcctggttgggaatggcgaagccggccagggtgtaggcgtcgtcgatgaacacctcgttcaactcacggatgaagcgctggacgtcgccgccatagtccttgtcgatcgagccacggaccttctccaccttggcgtggacctccaccgagccgctgcggatctccagccagtcggccttgtcggcgtccagcgcctggatgaagtcggcaatcgcctggctgctgtcctcgcccggctggatgtcgaggaacggctggctggccgcgccggttaccttgacggttaccgtctgacccggcgtggcgccgctgtagaccagttgcaacaggccgccgtagggcgataccagcgccaccgactggtttgcctggagcttgatgtccgggctcttgaggaagcgcggacggtcatactggcgggtattccacagccgcgtcgagccgatgcgctgggtgttcaggccgaccgccaggctggcctggccagcgtcttcgatgcggatgctcaggcgcttgcccggcgccgccatgcggccgatggcggtgaagccctgggccgacggcaaggtgagggtcagggtttcctccgagcccgataccggcatcgactgttggcgctggccggcgtagctgcccagttccttctgcgccgcgccggcttcgcgcacgtagccgacgatggcgtcggcgacgaaggtttcctggaagcgcgccgtgtcggcggccttgtccatcgggtagcggatgttctgccgcaccgcgtcggcccacagcagccagagccgcagcgaggtggtgccgggcagggcgaagaggttctgcgccttctggttgtaggcgtcgagggcgcctttcagtacatcgacgcgcttgctgaagtcgctcagtcccggcacgtcgtcgcaggtggtgcgaccgacgtaggaggtgcatttcgaccagtcgtagtccgtgcgccagctaccgtcgacgatctgctgcaccagcgccgggtcctggccataggcgccgcccagctcgaccgaacgcgtccgggtgcggctggatggcaccctgtccttgtcccagtagttgccgccgtaggggccttcctgcaggcccaggccggcgaggatctgctggccggtgctgctctggttccagccattggtgtgcacgaagaggatcggcagcccggcctgtagccgtgcgcgcaccgtggcgctcaggctagcggcgctggcgccgttgcccagtaccagcaatttgctggtgctggcgcaactggcgtcggtcagcgcgttgcaggcggcgtccgccggttgcaggccggcgctcttcaggccgttgagggcggcggtcttgtccaccccgaccacgctgaccttgaagtccttcgcagtggccgcgcccgggtcgccgttcaccagccactgcaccgcccgcttcagcaacggcgcgtgggcggcattggtcccgctcaactgggtgagcacgttggtgccataggccagcccgcggccgccggcctccaggctcaggctggcgagcacgcgccccttgtcgccgatgaggaagggcagggtattgtccgggttggccggcaggacccacatgctggcggcgccaggatcataggcttggctgaggttctggtagagaccgtcgagcaactgggtgcgggtctggcggatgcgctcgacctgctgctgcaggcgcagggcgaccaggtggctgtcggtcagttgcgaggaatccccgctgaccagtgccgcatcgaggatttcttcctgggtggcagcctgggcggacagcgcgccagccaggcagaaaccggccagcaacgctcggtggcgagggatgggtgagcgactcatgttctctccttgcagtgagggaaatgcagtggtggacaggctcacaactggcgctatcggcccgtggagggcggcatattgttatgggtgcgccgggtatcgcgtcgaacagggaatgggcctcggacaatgccggaaatacgcatgggcgatccgctgcatcgaacgagtcaaggcgagaggagcatgttgggaaaggcggaaaaactatctgttctggttgtttttgaactgcgtctgattattttgattttatttttaccgattgttcgaagcgctctggaataggcgctccagcgtttcctgtgacgaaacgatccagactttggttaggggcttggaaaataccgaggatgtacttccagagctgtcgatggagttggaagttgcagtttcatgaaggtttaggtacttcgaagttaccgcgttggcgatggaatcgatatcgtccggtagtgccttcggaagtgcctgataagtgccttcccacgctcaggcggcgaacagagccgccacgtccatcggattccgctccgccagcgccagttcgccttcgccgaaacttgcgctgctgccgccgacaccctgcgattgatcgcgcagtggcgggcgattcatgccaaagcctgtgacctgcagcacggctcgccgatgcaacggtagagacctatcggcaggtgctggaaacctgccgtttccagcacgaagatgccgtagggtgagagaaatacgtggtcgatctgtgtcgtgccgtccggcgtgttcagggtgacgttgtgcaggcggcggtaggtgtgcctgtccagttgccaatgggcgaacaggcgcaccagcagttcaccgatctgccccttggcccaaggcgatttgagcaggccgatcagcagggctgccgggataaaccaggtcagcatgccccagacctgggcgactatcgggctgtaatccactttcttccttgagccgagctgcttaatggagaggcgaccattgtcctatggcgcgatgacgcatcaaggactggtgagcccggtgcaggcgctcagcgtgctatctggtaacgggtgctacgccctctgccgggcagtcgctcgatgcagcccttttccagcaggtcgctcaggtggcgggtcgcggtggctttggaaaccttggccacagcttggtattgcgccgcactgatgccctcctcgaaccccctttcgccgccatcgagcaggcggttaagcactttgacttgctccgccgatagggtttggctgcggtgtgcctgccagaagcgcgccttgaccagcacgcggtcgatacgagcaagagcctgctccaggctgttgagcaacgtcgcgagaaaccattgcagccagttggtgatatccagcgtgcttttctgacttgcttcgagaatgcggtagtaaccggcgcggtcgtcgaggatgctcgcagacatggcgtagaagcgaatggcttgctgctcaccctgagccaatgccagatcggtgatagcgcgggtgaggcgaccgttgccgtcgtcgaaggggtgcagggtcacgaaccagaaatgtgcgatgccggcgcgcagaaagggatcgaggctggcatcgcggcggctgctctcgaaccaggcgagaaagtccgccagttgcgcttccagccccgcgcggggaggggcttcgaaatggactgtcgggcggtcgatgcgaccggaaaccacctgcatgggctcttcgccacgcagtgcaccgatgtgtagcggtcgagtcagcagttgctcatcagtggggaatagccaacggtgccaggtgaacagtcgctgttcgtctagcggctcttgatgtgcgtgggtggcatcgagcagcagttccgccaggccttcggagcgagaggtggttcgaccttcttcgtgcaatcccagtcgccgtgccagtgatgagcgcaccgaaccgacattcagttgctctccctcaatggctgaagaggtgacgatgttctgcagcatggcatccaggctgctctgcacttcggtgtcactccccacggcaccgagcattcctaacaaacgaccctgagcctggctacaggagcgcagcagtggtgcaagcgcttcggcttgccagttgaactgcggccagtcgggctgctgccagatccagagtgggtcgttcataagggatattcatgagccgattagagagcctattcggctcattttgtgagccgataatggcaactattcggctcactgtctaattctcaagctgggttgatagcttgatgagcatgcctgttcagggtgactgagtcagctaaagcgcctgtttcagcacgtcaaaaaccttgtggacagaggtcggccgtaccccttgggcatcgataaaatttgatgcagggacatgtagctctcgggctacaaaatgggggcaggtcacatgcgctcggagccgcagtgctggatgtacacgccgcgtaccatctcgtcttcggtgcggcgtgcccagtcttcggcgtcgcgcttggtgcggaaggttttttcgttggtcggccaatccgttttgcggcccacgggaaggggggacgactgttgccatcagataaggactccaaaggcaaactggctaaccagtactgtaccgactttgtaccttttggccatggagtcgtttatgaggccactaccctagaaagcgcaaagccgcgcagtgcgcggctttgaaggtggtgggcccacacggactcgaaccgtggaccaaaggattatgagtcctctgctctaaccgactgagctataggcccccagaaggtcggcggattataccggcgcttctcggggagcgccaatcggctggcgcggtttgaggaatttgctggcgaacagctcggccggcagcggcgggctgaggacgaagccttggatctgctcgcagccttcgtgggtgaggaagctctgctggccttcggtttccacgccttcggcgatcaccgtgagctgcatgctgcggccgagggcgatgatggcgcgggtgatggcggcatcgtggggatcgtcgggaaggccgcggatgaacgacttgtcgatcttcaggatgtccagcggcaggcgcttgaggtagctgagcgaggagtagccggtgccgaagtcgtcgatcgccagctgtacgccgaggcgcttgaggccgtggaggacggcgagggcctcctcggtctggttcatgatgaagctctcggtgatttccagttgcagccgcgacggttccaggccggactgctccagcagttgctcgaggcgttcgatcagttgcggctggccgagctgggcgccggcgaggttgaccgacagcgggccgaacggcgcgtgcagcttttgccattcgcccatctgctggcaggcgtgttccagcacccagtcgccgaggggcaggatcaggccgcaatcctcggcgagggggatgaagcgctccggggaaatttccccgaacagcggatggtaccagcgcaccagtgcctcggcgccgaccagcaagccgctctccaggctcagcttgggttggtagtagagctgcaactcgtcgcgctcgagggcgcggcgcagttcggtttccagcgccatgcgctcggtggccaggtaggtcagttcgcgggtgtagtactcgatgcggctgcggccccgcgacttggcgcggtacatggcggcgtcggcgttcttcaccagggtcggggcgtcgtcgccgtccttggggaacagggcgatgccgacgctggcgctgacgaagaattcatgaccgtcggcctggaacggcgcggtgaaggcattcagcagcttgcgcgcgacgtgctcggcgtcgctttcctggtgcaggccggggagcaggatgatgaattcgtcgcctcccaggcgggccacggtatcgacgtcgcgcaactggtcgcgcaggcgttcggcgatggccttgagcagcaggtcgccgatgggatggccgaggctgtcgttgatgtgcttgaagcggtccaggtcgatgaacagcacggcgccgggacgactctcttcgcgggcctcgtcgagggcgtgattgagccggctctcgaacagcaggcgattgggcaggccggtgagcggatcgtggtgggcctggtagtcgagccgggcctgggcgtacttgagggtggagatatcggcgaagacgccgacgaagtgggtgatctcgccctgcggattgtgtaccgcgctgatggtcagccattcggggtacagctcgccggtcttgcgtcggttccagatctcgccctgccagtgcccgtcgcgttccagctggttccacatggcgaggtagaagctggagtcgtgttgtccggaggagagcaggctgggcgagcgtcccagcgcctcctgctcgctgtagccggtgatctcgctgaaggcgcggttgaccgcggtgatgcgttggcgggtatcggtgatcatcacgccttcggcggtgctttcgaagacggtggcggcctgctgcagcttctcctgcatgagctggcgctcggtgatatcgcgggcgatggtcagcacgcagtcctcgccatcgatgctgatccggtgggcggacatctcgcactggcggatgccaccgttgcggtcccgtacaggggcggtgaagccctgggtcagggtgtggtggcgtaccagcgagatcaggcgcttgcggtcctcggtgtcgacccacaggccgagttcgagcgtggagcgggagatgacctcgtcgcggcggtagccggtgagacgggtgaagccttcgttcacgtcgatcagcgtgccgtcttcgaggcggctgatcagcagaccgtcggggtaggcatggaaggcgttggcgaacttctcctcggagatccgcagcagttcctgggtctccaccaggtgggtgatgtcgcggatcaccaccaccagcgccggggtctggtcgagggccacgtgctgggcgctgagcagcgcgctgaaggtactgccattgcggcgccgcaggggcacctcgaggttggtcaggttgccgtggccgagcttttccaggacctgcgggcccaggccggggagtgcccagatgcccagctcggtggcggtcttgccgatggcgtcgtcggcggcgatgccgatctgctgctcgaaggtgctgttcaccgcgaggaagcggccgtcggcgccgttggccagtaccaccatgtccgggcagtggtggaacaccgaagcgaacttctgttcggacaggcgcatggcctgctcggtgagcttggcctcggtgatgtcgatcatcagaccgcgcaggagcaggtcccggccttgcgtgatcggggtgaccaaatcgcgaatccagaccacccggccgtcggcggcgagcatccggtagtcgaagctgtggtcgcgtccggcctggctttcgctcatgcagtagtggatggcgtactcggcgtccatggggtgcagggtccgctgccagaagcccggctgcagccattcgccgaggggatagccgagcaggcgttcggcgtggggcgagacgtaggtgaagcggttctcctcgaggcgcatttcccaggcgatggcattcaggctttccaccagtccccggtagtgctgttcgctgtcgcgcagttcgcgctccaattgccgccggcgactcacctcgcggcgcaggcggcggttcatggccagcagtatggcgaccgagaccaggatcagcaggacgatgggaagaccgtaggtcgccatctcgcgccaggccggacgtcggtcgagcaggccgccgacccagggggcctggagtcgctcgatctcctcggcgctgaggtcggcgaggaccttgtcgacgatcccggcgaggatcggttgtccgcgcggcacggccatcgccagttggtagcggtatggcgtctcgccgctgatctccaggccgttgagcttgagctggcggaggttccatacgctggaggcgaagtcgccgacgaaggcgtcggcctggccggtggccagcgcctgcagggctgctgctaccgaaggcagcggcagcagggtgaggtcgggatgctgggcgatcagcagttcgtgaggagcatagtggtcgaccaccgcgaccttgagcccgtagagctcgtcgatgcgcttcggcatcgggccgttcttgcgtgccaggatgatgatcgggaaatccaggtagggccgggtgaagctcaggtactcctggcgctccggggtagccatgatgccgggcagcaggtccagccgaccgtccttggcctgctccaggacctgcgtccaggtcttcggttcgacaggcgtcaggctgacgcccaggcgttcctgtagcaggccgatgtagccggcggcgagtccctggtagcggccctgttcgtcgcggtattcgaatggcggccaggaggtgtccacgcccaggcggatgctcgggtgctcggccagccaggcccgttcctcgggcgtgagcgtgagggcgccggccagccccggccagcagcaggccagacacaggagaagcacggcctgcagacgctgcatgaggcggtctcgcggtggacgggaatataagcggaagtgtagacgccgggcggcggggcaagcggcaaagaaaaacccccggtttttcaggccgggggttcgttcgtcactcgtcgaggaaggagcgcaggtgctcgcttcgcgacggatggcgcagcttgcgcagcgccttggcttcgatctggcggatccgctcgcgggtcacatcgaactgcttgccgacttcctcgagggtgtggtcggtgttcatgtcgatgccgaagcgcatgcgcagcaccttggcttcccgggcagtgaggccggcgaggacttcgcgggtggattccttgaggctctcgctggtcgccatctcgatcggcgactgcatggtggagtcctcgatgaaatcgcccaggtgcgaatcttcgtcgtcaccgatcggggtttccatggagatcggctctttggcgatcttcagtaccttgcggatcttgtcctcaggcatgtccatgcgctcgccaagctcttccggggtgggctcgcgacccatttcctggagcatctggcgggagatgcggttgagcttgttgatcgtctcgatcatgtgcaccgggatgcggatggtgcgtgcctggtcggcgatcgaacgggtgatcgcctggcgaatccaccaggtggcgtaggtggagaacttgtagccgcgacggtattcgaacttgtccaccgccttcatcaggccgatgttgccttcctggatcaggtcgaggaattgcaggccgcggttggtgtacttcttggcgatggaaatcaccaggcgcaggttggcctcgaccatttccttcttcgcccggcgagccttggcttcgccgatcgacatcgcgcggttgatttccttgatctcggcgacggtcagctcgacctcgctttccagggccgccagcttctgctggttgcgcaggatgtcgtcgcgcaggcgctcgatggcctcggcatacttcggcttgctcttcaggacgctgtcgacccacttctcgtcggtctcgtggttcgggaacaggcgcaggaagtcggcacgcggcatgcgcgcgtcacgcacgcagagctgcatgatggcgcgttcctgggcgcgcacgccttccagggcggagcgcacgcgggcgaccagggcgtcgaactgcttgggcaccagcttgatcggcatgaacagctcggccaggccggtgagttcggcggtggcctgcttgctgccgcgaccgtgcttcttcagggccttcttggccttgtcgagctgctcggagaccgcggtgaaacgcaggcgggcttcttccggatccggaccgccgtcgccttcgtcgtcgctgtcgctgctgtcgtcgctttcttcttcctcgtcgtccttctctttcgagtcggcggaatcgtccttcaggttgaccggctccacctcttcggcgggcaggctgccgtcatcgggatcgatatagccgctgaggacatcggagaggcgaccgccttcggcgacgatgcgattgtagtcggccaggatgctgtccaccgtgcccgggaactgggcgatggcgctcatcacttcgcggatgccttcctcgatgcgcttggcgatttcgatctcgccttcgcgggtcagcagttccacggtacccatttcacgcatgtacatgcgcaccgggtcggtggtgcgaccgatgtcgctttccaccgcggccagggccgctgcggcttcttccgctgcggcttcgtcggtatccgcctcggccagcaacagggcatccgcatccggggctgtctcgaatacgttgatccccatgtcgttgatcatgcggatgatgtcttccacctgttccggatcggaaatatcctccggcaggtggtcgttgacctccgcgtaagtcaggtatccctgctcacggcctcgggcgatcaactctttcagacgagattgctgttgcgcttttccggacataacaccctatccactgaaggtcttggcgggcaaaaaataagcagaggattatacctgatgcctgggctgaggcgccagttcagctctgggaaggcgatgaagcggcaacactgtagtgctctctgagcaaggctttctcttcatcggtcagttcactgtagctcttctgcatgacgctgcgtaaacgctcctcccgctcgccgaaacgctggctctcggagagtttagtaatggtgtcgaagaactgcttttcaaggttctcctggacgatcagccactccttctcgcccagggcctgcagcaggcggccctggggcgtgccgtgccagcgcgcgatgagttgcatcgagctctgccgcgggttcttctgcagggcttccagcagggacaccagcaactgggcgtaggtatcctgctccctggcgagggtgcccgcatcgtcgaccttcaaggccaactgcggatgatgcagcaaggtgcgcagggcgttgagggtggtggactccacgctgaccggcgttcgttgcggcgtcttgaagtcgccgcggccgcctttgtcccacttcttcttgccatcccacttcttgccgtcccagggcttcttgtccttgttccagctcttgcgcggttgcgcctcgccatagcctggcgcagcgtcgaacggcgcatgggagggctcgttctcgtagtaggcgctggcggcgaaatagtcgtcgccgtccaaggcgccgctcgctccgtggtccatggacgacggcggcgggctgtggtgcgccagttgtccgatgttttcgccggacaggccggtgatttccgacagacgttgtcgcatcagcaggcgcaggttgttcccgggaatcttctccagcagcggcgcggcgagggtcgccaggtgggccttgccttccagggtggcggggtcggcctccagcatcagttgctggaagaagtactccgccagcggctgggcctgctgggtgatgcgtgcgcggaaggcatcctcgccctcggcgcgtaccaggctgtccgggtcctcgccctcggggaggaacaggaagcgcacgcgcttgccgtcctgcaggttcggcagcaccgactccagggcgcgccaggccgccttgcgcccggcctggtcgccgtcgaaacagaacaggatgctcggtaccaggcggaacaggcgcttgatgtgttcctcgctggtcgccgtgccgagggtcgccaccgcgttgcggatgccttgctgggccagggcgatgacatccatgtagccctcgaccaccatgatctcgtcgaggtcgcgattcttctgccgggcctcgtagagtccgtagagttcctggcccttgtggaagaccggagtctccggggagttcaggtacttcggcttgtcgtcgccgagcacccggccgccgaaggcgatgatccgcccgcggctgtcgcggatcgggaacatcacgcgatcgcggaagcggtcgtagcgcttgccggtgtcgctgttctccaccagcaggccggcgtcgagcatggccttgagttgcaggttgtcgccacccaggtgcttgagcaggttgtcccagccgggcggggcgaaaccgaggccgaagtcgcgggcgatctcgccggtcaggccgcggcccttcaggtagttcaccgcggctttgcgcgccgggtggcttttcagcgcctgcttgtagaactcggcggcggcgctgagcagcgggtagagcggcgagtcggtcggctggcgcggcgtgtgcccgcgtccgccgcgttcctcgcgcggcacgtccatgccggcgcgcttggccagttcctcgaccgcctgggggaactccagctggtcgtggtccatgacgaagccgagcgcgttgccgccggcgccgcagccgaagcagtagtagaactgcttgtccgggctgacggtgaacgagggagtcttttccttgtggaacgggcagcaggcgctgtagttcttgccggttttcttcagttggatgcgtgaactcaccacctcgacgatgtcggtgcggttcagcaggtcatcgatgaagctttgcggtatcaggccggccatggtgttctcgaaaacgacggcgcgtgggcgcagagcggcagcatagcaattatcgccgggccgatcaggccggcgcggtgtttcaggaggagagacgcgccttcaggcgctggctgacctgtgccatgtcgacgcgaccctggacctgcggtcgcagcaggttcatcgccttgcccatgtcctgcggaccctgggcgccgctgtcgacgatgctgcgctcgatcagggcgtcgatctcatggtcgtccaggggcttgggcatgaagtcctggagcacgaggatctcggcggcctcgacctcggcgaggtcctggcggccggcgtcgctgaactggcgctgggcgtcgcggcgctgcttgatcatccggtcgaggatcagcagggctcgggcgtcatccacctcgatgcgttcgtcgacttcgacgcgcttgatgtccgcgagggccaggcgtaacgtggtcagccgcggcttgtcctgggcgcgcatggcgaccttgacggcgtcgaggaggcgggatttgatttcgctcatggcggaaagccgaaagcccggccggggccgggctgaggcacgatcactgacgcgtgggcgtcgagtggatcagtacaggcgctcgcgacggcgctgttcgcgctgtactttcttcgcgtggcgcttcactgcggcagcggccttgcgcttgcgctcggcagtgggcttctcgtagaactcgcggctgcgaacttcagccagtacacctgctttttcgcaggagcgcttgaaacgacgcagggctacgtcgaagggttcgttctcttttactttgacggctggcatccaggtcgtaccttcactgattaccgggggttgaacgtactccggcaaggtggcgcggatacgtcggttttcaagggttgcggatattaacggttcggccggaggaatgcaaagcctccgatcgaaaaacactggtctggcgcaaagccgccgattatcatgcgcggcttcgtatttgccaagctctaaggctcaagcccatgcgcgtgctgggactggaaacgtcctgcgacgaaaccggcgtcgccctttacgacagcgaacgcggcctgctggccgacgcgctgttcagtcagatcgacctccatcgcgtctacggcggcgtcgtgcccgagctggcctcgcgcgaccacgtcaagcgcatgctgccgctgatccgccaggtgctcgacgagtccggctgcacgccggcggatatcgacgcgatcgcctataccgccggccccggcctggtcggcgccctgctggtgggggcttcctgtgcccaggcgatggccttcgcctggggcgtgccggcggtcggcgtgcaccacatggaagggcacctgctggcgccgatgctggaagagcagccgccgcggttcccgttcgtcgccttgctggtttccggcggtcacacccagttggtgcgggtggacggcatcggtcgctaccagttgcttggcgaatcggtggacgacgccgccggcgaagccttcgacaagaccgccaagctgatcggcctgggctatcccggcggtccggaaatcgcccgcctggcggagctcggcactcctggccgcttcgtgttcccgcggccgatgaccgatcgccccggcctggacttcagcttcagcgggctcaagacctttaccctgaacacctggcagcgttgcgtcgaggccggcgacgacagcgagcagacccgctgcgacatcgccctggcgttccagaccgcggtggtcgagaccctgctgatcaagtgccgtcgcgccttgaagcagaccggcctgaagaacctggtgatcgccggcggcgtcagcgccaaccaggcgctgcgcagcggcctggaaaagatgctcggcgaaatgaaggggcaggtgttctacgcccgcccgcgcttctgcaccgacaatggcgcgatgatcgcctacgccggctgccagcgcctgctcgccggccagcatgacggcccggcgatcagcgtccagccgcgctggccgatggagtcgctgccggcggtctgagtggccgccaggtcgcagtcaggcaggtgtcgatgacgcagctgggccagactgcatgaagttttttccttttatggattagaaatgccgttcgcggccggcgaacagatcgcgtaagttggcgcggtgtcgccagacgatcaggccggtcagcacggtcatcggcagcagcgctccgggctgctgccaggccagcaacggcagggtcagcggggtggccaccagcgaggcgagcgagctggtgcgcgacagcttgaaggtcagcagccaggccgccgcggccagcagtacggccggcggatagaggccgaggagcatgcccgcggcggtggcgacacccttgccgccgcggaagttgaagtacagcgggtacaggtggccgatcacggcggcgatgccgacccaggcctcctccatcacgccgagccccagccagcgggcgaccagcaccggcagcaggcctttgccgacgtcgccgagcagggtcaggatggcgagtttcttcccggcgacgcgcagcatgttggtcgcgccggggttgccggaaccgctggcgcgcgggtcctgggtgccgaaccagcggctgagcaggacggcgaaggagagggaaccgagcaggtaggcgaggatcgccagtagccagaccatggattccaccgaggacgaggatgtcctcgattctaacggggcggcgcacgcttgtcgtggcatcccttggagcgggtagcgaagtggacagagtttttatcgaaggcttggaggtcgataccgtcatcggcgtgtacgactgggagcgcggcatccgtcagtgcctgcgcctggacctgaccctgggctgggacaaccgtccggccgccgcgggcgacgatctcgccctggcgctggactatgccgcgttgtccgagcgggtgcaggagttcgcccgggaatcgcatttccagttggtggaaaccttcgccgagcgcctcgccgaggtactgatgggcgagcgcggcattccctggctgcgcatccgcgtgaccaagcccggcgcggtgccggcggcccgtggcgttggcgtggagatcgaacgcggatgtcgctgatcccggtctacctcggcctcggcagcaatgtcgagcgtgagcgccatctgcatgccggcctcgatgcgctggccgctttccttcatgacctgtgttgttcgccggtattcgagagcgagccggtgggtatcaagagcgggccgttcttcaacctggtggtgtctgcccgcaccgatctgccgctggccgaactgagcctgcgactcaagcacatcgaggccgacaatggccgctatgcgccagagcgcaaggggctgccgctggatatcgacgtgctgttctacggcgacctagtgggcgatttcgatggcctggtgctgccgcgcgccgaagtgctgaagaacgctttcgtgctctggcccttgtccgagctggcgccgaacctggagcatccggtcgcccgccagccgctgggcgatctctggcgcgaggcgaggatccagcagaagctctggccggcgccattcgaatggcgtggccaggcgttgactcccgaagcgctgcttcaggcctttccgcgttcttccttgtaggccttgagtgcggcgaggcgcgcacgcttcagcgcctcgcccagttccgcgcccttcaagcccttttccaccagcggcttcacgctgactgcccgcgctgcctgcgccgcgccgagcaggtaggcggcctgcggatagtcccgctgttccaggccgaggcggccgcgcgcgtccatctcgctggcggcgacgaactcctcgaaacgctgcgggcggcgatacacgtcgaagctctgcaacagctccagcagtgtattcgggcgcagctccagcgcccgatgggcgtgggtgtggtactcgcccaccaggcgcgccagttcctggcagtcgcgcggcaccctgaagcgctggttcaccgcatcgatcaacggcacgccgcgagcctcgtgggcgatatggcggggccagtccgcttcgctggtgagtcccttgcccaggtcgtgcagcaggcaggcccagcgtacgctgagcggctgccggtggcgggcgcattgctgcaataccgacaggacatggacgccggtatcgatttccggatggtgggccgccggctgcggtacgccgaatagcgcctcgacttccgggatcagttcggccagggcgccgcagtcgtgcaggacctggatgaagacctcggggttgggttccatcagggctcgggaaatttccttccaactgcgctccggggtcagcgcctgcaactcgccggattccgccagttggcgcatcagggcgagggtttcggcggcgacccggaagcccaggccggcgtagcgggcggcgaagcgcgctacgcgcaggacccgcaggggatcctcggcgaacgccggggaaacgtggcgcagcaggcgcgcctcgaggtcggcctggccgccgtaggggtctattacccggccctgttcgtcctcggccatggcgttgatggtcaggtcacggcgagtcaggtcttcctccaaggtcacctcggggctggcatggaaggtgaagccgccgtagccgcgcccgctctttcgctcggtgcgcgccagggcgtattcctcgccgctctgcggatgaaggaagaccgggaagtcggcgcccaccgggcggtagccgcgggcgagcatctcgtcgctgctggcaccgaccaccacccagtcgatatcggtgaccggacggccgagaaggcgatcgcgcacggcgccgccgaccttgtaaatctgcatgggaatcctccgcgtgataggcggaagtctaccccagggtgtcctagcgggcgcgtggaagctgccggagcagggcgccgaccgccagttcgagctgttccggattggccctggcggggctgaggccggtgcttaccataccttcccagagaacgcgctcctccaggtcgaccaggcgcacgcgcaatgtcccggtttcgtcgcgcagacggtggatcgccagataaggccccatgccggaggtgggcggaaggtcggggcggaattccagcggtgcgtcgcgcagcgccagccagtagtagacgcggaattgcggggtggcgctctcgtggtagccgtgggccgccagtccctggcgcagctctgcgtttatcagcggatagcggttgcggtagggcagggcgtcgaccgcctgttccggcggcatcaactggaaaccttgcaggccgggcagtccggcgctggccggatgggtcacccgggcgctggggatgtggctggcgcaggtggccaggacgaggcagagcaggacgatggcgaacaggcgcatggcggctcccgtggacggccggcttcttgttctgctgtgggcggcccgaccgtgccggcatgctggccggcggtcggggcggacgtcaaccgatcaaatgggcgggatgatcaggtccaggcgcgggtagccttcctcgccctcgctggcgcccttgggcggcatgtggtgggtctgcacgagctggtcgccctgtagggtctccaggtggatatcgaagccccacaagcgatgcaggtgcttgagcacgtcggcggtggaatcgctcagcggctggcggtcgaactgctggtggcgcagggtcagcgagcggtcgccgcgacggtcgacgttccagatctggatgttcggctcgcggttgccgaggttgtactgcgccgccagggtctcgcggatggtgcggtagccggcttcgtcgtggatcgccgcgaccagcaggtcgtccttctggtcgtcgtcgagaatgctgaacagcttcaggtcgcgaatcaccttgggcgagaggaactgcaggatgaagctttcgtccttgaagctcttcatggcgaacttcagcgtggccagccagtcgctgccggcgatatccgggaaccagcggcggtcctcgtcggtaggttcctcgcagatgcggcggatgtcgcggtacatggcgaagcccagggcgtaggggttgatgccgctgtagtaggggctgtcgaaggacggctggtagaccacgctggtgtggtattgcaggaactccatcatgaagccgtcgttgaccaggccttcgtcgtagaggtcgttgagcagcgtgtagtgccagaaggtcgcccagccttcgttcatcacctgggtctggcgttgcgggtagaaatactgggcgatcttgcgcacgatgcggatcacctcgcgctgccagggctccagaagcggcgcgttcttctcgatgaagtagaggatgttctcctgcggctcgctcggatagcgcgccatggattgttccttgtccttgccgccgacgcgcgggatggtccgccagaggtcgttgacctggcgctggatcagttcctcgcgctccttctgccgctgccgctcctcttccgcggaaatcgggtagggacgcttgtagcggtcgacaccgtagttcatcagggcgtggcaggagtcgagcaggtcttccaccgcgtcgatcccgtagcgctcctcgcactgcatgatgtactgcttggcgaacaccaggtaatcgatgatcgaactggcatcggtccaggtgcggaacaggtagttgcccttgaagaaactgttgtgcccgtagcaggcgtgggcgatcaccagcgcctgcatgcactgggtgttttcctccatcaggtaggcgatgcagggatcggagttgatcacgatctcgtaggccaggcccatctggccacgcttgtagttcttttccgtactgaggaagtgcttgccgtaggaccagtggttatagccgatcggcatgcccaccgaggcgtaggcgtccatcatctgctcggcggtgatcacctcgatctggttcggataggtatccagggcatagcgctcggcgatcctgctgatttcccggtcgtactgctggatcagctcgaaggtccattccgagccggtggcgatgggctggcgcttgctcatgcgacgagcctcctctggaacagctcgcggaacaccgggtagatgtccgatgccgagacgatctgctgctgggcgaagctgtcttcgaaggcttcgcgcacgcgctcgtactcgaaccacagggcctggtgttcgcgcggggtgatctcgacgtaggtgtagtactggacgaacggcatgatctgcttgaggaggatgtcccggcacaccggcgagtcgtcgttccagttgtcgccgtccgaggcctgggcggcgtagatgttccactcatgggtcggataacgctcggccatgatctcctgcatcatcttcagcgcgctggagacgatggtgccgccggtctcgcgggagtagaagaactcctcctcgtcgacctcgcgggcgctggtgtggtggcggatgaacaccacttcgatcttctcgtagttccgcttgaggaacaggtagagcaggatgaagaagcgcttggcgatgtccttggtcgcctgggtcatcgagccggagacgtccatcaggcagaacatcaccgccttggaggtggggttgggctgcttgaccagcaggttgtacttgagatcgaaggtatcgaggaacggcacccggtcgatgcgcgcgcggagcttggcgatttccagctcgagttcctggatatcgccgaggttgtccggctcttcgcgcttgatccgctccagttccttcagcgccgcgcgcagcttggcccggctgccgccggacagcgcgatgcgccgcgcatgggccgagcgcagggtgcggacgatgttgatgcgcgacgggttgccgtcgttgctgatgccggcgcggacggtcttgaaggtgtcggtgccggtgatgtggcgcttgaccaggttgggcagctccaggtcctcgaacatgaagtcgaggaattcctcctgggtgatctggaagacgaagtcgtccatgccttcgccgctgttgctggccttgccgccgccgcggccgcccccgccgccggatgggcgggcgatgtgctcgccggcggtgaattccttgttgccggggtggacgacggtctgccgcccgccgcggccatggtgcagcaccggttcgtcgatatcgcgcccgggaatgctgatctgctcgccgtgctccatgtcggtaatggaacgccggctgacggcctcctcgacggccttcttgatgtgttcacggtagcgcctcaggaagcgctggcggttcaccgtgctcttgttcttgccgttcagacgccggtcgatgacgtagctcatgaatgctcctcagggcctgtggcgccccgccggagcggaggcgccgaggtccgaatgcgacggcgaccggtacggtcgcagcgaccgtaccgatggcagactactgcgacttgcgaacccgcaggtaccattccgacagcaggcggacctgcttctcggtgtagccgcgctcgaccatgcgtttgacgaagtcgttgtgcttctgctggtcctccttgctggccttggcgttgaagctgatgaccggaagcaggtcctcggtgttggagaacatcttcttctcgatcactacgcgcagcttctcgtaggacagccagctcgggttcttgccgttgttgccggcgcgggcgcgcagcacgaagttgacgatctcgttgcggaagtccttcgggttgctgatgccggcgggtttctcgatcttctccagttcctcgttgagggcggcgcggttgaggatctcgccggtttccgggtcgcggtattcctggtcctggatccagaagtcggcgtacagcacatagcggtcgaagatgttctgaccgtattcgctgtaggactccaggtaggcggtctggatttccttgccgatgaactcgacgtagcgcggcgccaggtattccttgatgaagcgcaggtagcgctcgcgggtttccggctggaactgttcctgctcgatctgctgttcgaggacgtagagcaggtgcaccgggttggccgctacctcgtgcgggtcgaagttgaataccttggagaggatcttgaaggcgaagcgggtggaaagcccggccatgccttcgtcgaccccggccgagtcgcggtattcctggatcgacttggccttgggatcggtatctttcaggttttcgccgtcatatacccgcatcttcgagtagatattcgagttttccggctctttcagcctcgacagcacggagaactgcgagagcatcttcagggtgtccggcgcgcagtgggcatgcgccagcgagctgttgaccagcaacttgtcgtagatcttgatctcgtccgccacgcgcaggcagtacggcaccttgacgatgtagatgcggtcgatgaaggcctcgttgttcttgttgttgcggaaactgtgccattccgattcgttggagtgagccaggatgatgccgctgtagggcagggcgccgagaccttcggtgctgttgtagttgccttcctgggtcgcggtcagcagcgggtgcaggaccttgatcggggccttgaacatctcgacgaattccatcaggccctggttggcccggcagagggcgcccgaatagctgtaggcgtccgcgtcgttctgcgggtattcctccagcttgcggatgtcgaccttgccgaccagcgcggatatatcctggttgttctcgtcgccgggttcggtcttggcgatggcgatctggttgaggatcgaggggtacagcttgaccacgcggaactggctgatgtcgccgccgaactcgttgaggcgcttggttgcccagggcgacatgatcgagcgcaggtagcgcctcgggatgccgtagtcctcctcgaggatggcgccgtcttcgtcggggttgaacaagcccagcggcgactcgaagaccggtgagcccttgatcgcgtagaagggcaccttctccatcagttgcttgagtttttccgccagggaggatttaccgccgccgaccgggccgagcaggtaaaggatctgcttcttctcctccaggccctgggccgcgtggcggaagaacgcgacgatctggtcgatgcattcctccatgccgtggaagtcggcgaacgccgggtagcggcgaatcaccttgttggagaagatccgcgacagcctggagtccaccgaggtgtccagcaattccggctcgccgatcgccatcagcaggcgctcggcggcagaggcataggctgtcttgtcttgcttgcagaggtcgagatattcctggagggaatattcctcttggcgggtcgcttcgaagcgttcctggaagtgactgaaaatgctcatgacgtctcctcgctcgatgcagtgagccggcgcgggatcggtcgtgcgggtgcgggggggccgccagccaggccggcgagaatcccccagactccgtcgctgcacggtgcttccctttccgccagcgctcctaacggtcacagccgatggcccggaagccggtgtgccggctctcccctgttttggatggcctgaggaaaagaatagttcgttctggacggagtaaaggaagaaaggcgagagaagttacagtttttttggcggggtagcggcgcggcctactccgcttcgccgctgctggtatccgcgggatagacgctgcgccatagctcgaagccgccgtcgaggctgtagacgtcgctgaagccctgctggatgaaataggcggcggcgctctggctggagttaccgtggtagcagaccaccaccagcggagcgtcgaggtcggcggcggcgatgaagtccgccaccgagtggttgtcgatgtgccgcgagccgctgatgtggccgacagcgaagctctgcgggtcgcggatgtcgaccacctgggcgccgttttcgcggagctggcgggcctgttcgggggcgatgcgctggaaggtgtcgctcatgtcggggtacctgtgtacagggcgtccaccggacgccggggattcatgcgggcgtggcggcgggtctggccggcgcgcgctgttcggcgcaatcgcagctcaggcgttcgccgctgtcgacgttcagcagggtcatccgcgcgccccagacgcagccggtgtccagggcgaacaggccgggctcgtcgcagtggccttcgagggccgcccagtggccgaagatgatcttctcgccgcgggtcttgcgcgaagggaagctgaaccagggggcgtagccgggcggcgcggtgtcgaggccttccttgctcttcaggtcgagcttgccatcttcggtgcagaaacgcatgcgggtgaagtagttggtgatcaccctcaggcggtcgatgccatgcagcttcttgtcccacttggccggttcgttgccgtacatgccgtcgaggaacagcggcaggcgctggtcgtcgcgcaatgcttgctccacctcggctgcgcgcaggcgggctttttccaggctccactgcggggggatgccggcatgcaccagggcgaccttgcgttgttcgtcgtagtgcagcagcggcaggcgacgcagccagtcgagcagtggctcgcggtccggcgcctcgaggatttcccgcagcgtgtcggacttcttcaggcgctcggacttgtgcgccaccgccagcaggtgcaggtcgtggttgcccaggacgctgaccaccgactcgcgcatggcatagaggaagcgcagcgtctccagggactgcgggccgcggttgaccaggtcgccgaccagccacaggcggtccttggccgggtcgaaggcgacgcgctccagcaggcatttcaggggatccaggcaaccctgcaggtcgcctaccgcgtagaccgccatcagtgcagcgctcccggtacggccaggcgaaacaccgggatcgcggcgtcgaaggcgattccgtcgctgccgagcatctggtagctgccgcgcatgctgccgacccgggtcgccagcaccgtgccgctggtgtaggtgtgttgcgcgccgggggcgatcagcggttgctcgccgaccacgccggcgccgcgaacttcctgggtacggccgtcgccgtcggtgatgatccagtggcgcgacagcagttgggccggaacctcgccctggttctcgatggtcaccgtgtaggcgaaggcgaaacggttctgctccggggcggactgttccggaaggtagcgggtgtcgaccctgacgttgacctggtgctgggtatcgctcatacggcttgcctgattcctgacgagtgtctcaccagactaacgattgcctggcagctcggccagccggttggccaggcggacgaatgcggccaggtcgagttgttcgggacggagggtcggatcgacctctgcggcctcgatgtcctcgacgctcaggagaggcttgagggtgttgcgcagggtcttgcggcgctggttgaaggcctcgcggaccacccgctcgagcagtttcggatcgcgtgccggatggggcggctcggcgaagggggtgagacggacgatggccgagtcgaccttgggcggcgggttgaacgcgccggggccgacgttgaacaggtgctccacccgacagtgatactggaccatgatcgagagccggccccagtctccgccgcccggcgtggccgccaggcgctccaccacttccttttgcagcatgaagtgcatgtcctcgatcaccggcgcgtgctccagcagatggaagatcagtggcgtggagatgttgtagggcaggttgccgaccactcgcagcttctcgccgctctccaccagcgaggcgaaatcgaacttgagggcgtcgccctggtgcaggctgaagcgcgactcgaggccgaatttcagcttcaacagggggatcaggtcctggtcgagctcgatcacgtccaggcgtgcgccgctgcccagcagtccctcggtcagggcgccctggcccgggccgatctccagcaggcgctgaccctcgcgggcatggatggcacggaggatgcggtgaatcaccccggcatcgtgcaggaagttctggccgaagcgcttgcgcgcgcggtgttggtaaagctcggacattggaaacggttccaggctgcgggccccaggccaaggcgggaggcgcggatgcgaaagggcgccattttaacagcgaagcgtcgggccggcagggctaaacgatggccgaccgccgtcagcagcggctggccgccatctggtaggcggtttccagggcgacctgcaggctgccgctatcgatgcggccgcttccggccaggtcgagcgcggtaccgtggtcgacagaggtgcggatgatcggcaggccgagggtcacgttcacggcggcaccgaagcccttgtacttgagcacggggagaccctggtcgtggtacatcgccagcaccgcgtcgcaatgctccaggtgcttgggagtgaacagggtgtcggccggcagcgggccgaccaggtcgaggccttcgccacgcaggcgctcgaggcagggttcgatcacctcgatctcttcccggcccaggtgaccgccttcgccggcgtgcgggttgagtccgcagaccaggatgcgcggatgggcgatgccgaacttgtcgcgcaggtcggcgtggaggatgcgcgcgacccgggacaggcgctcgtcgctaatggcgtcggcgacctcgcgcagcggcaggtgggtggtcgccagggccacgcgcaggccacgagtggccagcatcatcaccacctgggcggtgtgggtgaggtcggcgaggaattcggtatggccggaaaaggggatgccggcttcgttgatcacgcccttgtgcaccggtgcggtgatcatcccggcgaagtgcccgtcgaggcagccctggccggcgcgggtcagggtttccaggacgtaggcggcgttggctcggtccaattgcccgggccggaccggggcggccaggggcgtatcccatacgtacagttggccggctttggccggtcgctctggccaggcggccggggaaacgtccttaaggtcgatcgccaggcccagttggccggcgcgctcttgcaggagcgtgcggctggcgatggcgatcagggggtggggctgggcggagcgggcgagcagcaggcacagatcgggtccgatacctgccggctcgcctggagtgagcgcgaagcgcaggctcactgcttgatttccacgtaggcctcgtcgcggatctgccgcagccaggcttgcagttcctcgtcgtacttgcggttgcgcagtacgcttaccgcctgctgctcgcggaacttctcgctgctgtcggtggcgcgacggccgaggacctgcaggatgtgccagccgaactgcgagcggaacggcttggacagctcgccctgcggggtatcgttcatcacctggcggaactcgggcaccagggcttccggatcgatccagttcaggtcgccgccgttgagggcggaacccggatcttcggagaagctcttcgccagttcgccgaagtcttccccggactggatgcgctcgtacagcttctgcgccagcttctcggtctccgcttcgctgcggatctcgctgggcttgagcaggatatggcggacatgcacctcgtcacggaccatcttgctgccgccgcgcttctcttccagcttgaggatgatgaagccgccgggggtgcggacaggctcggtgacgtcgccgacggccagggagccgatcatgctgtcgaacggctgcggcagctgggcggccttgcgccagccgatctcgccgccttccagggcattgtcgccggccgagcgggaaatcgccagttggccgaagtcggcgccctgctttagctgctggtagagctcctgggcctgccttgcggcggcctggatcacgtccgaggacgcggcttccggcaccgggatcaggatattggccaagcggtactcttcggaaagctggatcttgcccatgtccgaggcaaggaagttcttcacctcctgctcgctgacctggatgcgctcggcgacccggcgctggcgcacacggctgatcaccatctcgcgacggacctgctcgcgggcgtcggcgtaggacaggccgtcgcgggtaagggcggcctggaattgctccaggctcatgccgttgcgctgggcgatggtgcccatcgcctggttcagctcctcgtcggagatacggatgccggagcggtcgccgatctgctgctggatgttctcgatgatcaggcgttccagcacctgctgggtcagcacgtgctcgggcggcagcggcgcgccgcgcttgagcagcgtctggtgcacttcacgcaggcgctggtcgagctggctctgcatgatcacatcgttgtcgacgatggcgacgacccggtccagtggtaccacttcggcatgcgcgaaggagcaaaggagtgctgcgcccaatgcaagggggcgcagccggttacatagcttgatcttcacgttgacgataaccttggatgcctttgtcgaggaacatttccgtcttgttgcctacgatgccgccgaggcccttcaggacgatctgcaggaagatgccgcggtcggccttctcgctctgtacgaagaaggcatcgtcgtccacgtccaaccagtagcggttgatcaggcgcagcttccagcagcagctgtcgtattcgaagccgccgaacgcctcgagggtgcggttcttgttgtagtcgtactgccagcgggcgagcaccgaccattgtggcactagcggccagatgaccgagaagtcatgctgcttgatgatgtcgtcttcccggccatagacgaagcgaccggtcgaactgttgaagcgtcgggcatcttcgcggtagcgataaccagcgttgaccaccttgttcggattgtcttccggttgatagtggaacatcgcgctgccggattcggtacggctggtattgggattccagttgtaatcggagctgagacgccaatcgcgattgaagcgatattgtcccatcaaggcatagggggagcgccagctatcagtgtcaggctccctcaggaactcatccggataccgctctttggcgatagcgagatctttctcgctcaagccgggcaattggactcggcgatcacggaaataatagatctgtcccgcgctcaagctggcgcgttcgaaaccattgggctcgatgaagcgagtagtcacgccgagcgacagctggttggcatcgccgatgcgatcacggccggagaagcggttctctctccacagcgagtcgtagttgaacgaaggctcgctggtgtcaaagaccggaatcttcgattggtctttgtaagggacgtacagatacattgcgcgcggctccagggtttgacggaactgcgtgccagcgaatgtggtatcacggtcaaaatacaggccactgtccaccttgaccaaaggtagggagcgatcctggctgctgtcgaacgtttcctggtaggcggatagagtacttttgccctggctgtccaggtcaaggtcgtacttggtgtacaagagcttcaacgttggagtcagatagccccagcttctggtcatcggcaggctcatgcccggctcgagatgcacacggtcgccagtggagcgggcaagcccttcgatataggcgtccgggtgcttgcggccgcgaatgctaccgtcgtcgttgaagtaggtcttgtcgtccagattcctgtcgaaccgaacaaattcggtcttgtagtcgagcttcaaaccgccaggctcataaggcaggaaaccatcgaaagtgacctgcggcagacggtcatagggggtgacatcggtggtggtcgccatttggtaaccctgcaggttcaagcgaccagtgaaggtgtctcccctgtaggttacgctgccacgctggttgacataagttgtgctgcccacgcctagatcggtatccagatcctggaagtaatagggatcgctgatccgcgtgtagtcgacctcggccagccagcgcgaatcgaggccggtggtgttcttgaggccgtacagccagcggtccttgctgtagtccgggaagttctcgcggtgatcgtccttgtcgttcaggtaggcggcgttgacggtgccttcgctgctgtgggtcaggtagcggaactcgccttccagcatcatgccgcgcttggccatgtagcgcgggtacaacgtggcgtcgtagttcggcgccaggttgaagtagtacggggtgaccagggtgaagccggtgtcgctggtgctgctgaagctcggcggcaggaagccggactggcggcggtcgtcgatcgggaaatagatgtacggggtgtagaacaccgggaaatctttgacccggagggtcgcgttggtcgcggtgccgaagccggtggccgggttcagcttgacgttgttgcccttcagagtccaggcgttgctgctcggttcgcagcgggtgtaggtgccatccttgagcatgatgatggcgttctcgctgcgcttggcgtagagcgcgctgccgcgggcatgggccttgtggatcacgtactcggcgttgtcgacctgggcctcgccgttgtccagctggacctgggcgtggtcaccgaccaccagcatgcccttgtcgcgcagcttgacgttgccgaccagttcgccgcggttttccagctgatgcaggttggcctcgtcgccttccacctgcatgcttccctggcgcaggaccacgtcaccggcgagggtggcgatctgtttttcctgctcgtagcgcgaagccttggcggatacgtaggtcgggctctcgtcgctgggcgcgccgtcatccatgcccggacgcaccggctcgatgtaggagccgccgcaataggggccgatttccgccaactgggcggcggtcagtttttcccgaggaatccagtcgaggtgcgagtagtccgcactgcgggacttcagcgcgcgaccgccggactcggtgaccaggcgctgggtcggctctgcctcgacggtttcgcctccgctgccggatacactggtgcccgccgcggcggtgctgaccgaggtcgcggtatgcgccgggcgcggtggcaggttggcattggcgttctgcagcggggagcaatcccagccgccggtggccgataccttgcagtcgaactgatcggcggcctgtacagtcaatgctgcgaccggctgcagagccagcaggctgccggtgaccagcaggggaaactttcttcgaaacacgagggatttcactgccatcttgttaatccgggcttcctgcgcgccatcggcccggtgggccgcacgcctctcgatgggctgaaaaagatgctggataataaagcatgacctgcgcaacggctagggccgtggagaaccccgtaaatgtctgatgatgcccgtttccagcagctgaatcgctggttggactcttgtttgcccgagttgttcgttgccgaaggttggggggaagtgccccccgccgaactgatcccggccagtagcgacgccagcttccgtcgttatttccgctggcagggaggggaccgcagcctggtggtgatggacgcgccgccgccccaggaagactgccgaccgttcgtcaaggtcgccggactgctcgccggagccggcgtgcatgtgccgaggattctcgcccaggatctggagaacggtttcctgctgctcagtgacctgggccggcagacctacctcgacgtgcttcatcccgggaatgccgacgagctgttcgaaccggccctggatgcgctgatcgccttccagaaggtcgatgtcgccggtgtcctgcctgcctacgacgaagcggtgctgcgccgcgagctgcagctgttccccgactggtacctggcccgccacctcggcgtggagctggagggcgagacgctggcccgctggaaacggatctgcgacctgctggtacgcagcgcgctggagcaaccgcgggtgttcgtccatcgcgactatatgccgcgcaatctgatgctcagcgagcccaacccgggcgtcctcgacttccaggacgccctgcacggcccggtcacctacgatgtcacctgcctgtacaaggacgccttcgtcagttggccggagccgcgcgtgcatgccgcgctgaaccgttactggaagaaggcgacctgggccggcatcccgctgccgccaagcttcgaagacttcctccgcgccagcgacctgatgggcgtgcagcgccacctgaaggtgattggcatcttcgcccgtatctgtcaccgcgacggcaagccgcgctacctgggtgacgtgccgcgcttcttccgttatctggaaaccgccgtggcgcgccgtcccgagctggccgaactgggcgagctgctggcctcgctgccgcagggagccgaggcatgaaggcgatgatcctcgccgccgggcgtggcgagcgcatgcggccgaccaccctgcacacgcccaagccgctgatcgaggccgccggcgtgccattgatcgagcgtcagttgctggcgctgcgccaggccggagtcgacgactgggtgatcaaccatgcctggcttggcgagcagatcgaggcctatctcggcgacggttcgcgcctgggcgggcggatcgcctattccccggagggtgaaccgctggaaaccggtggcggaatcttccgcgccctgccgttgctcggcgagcagccgttcctgttgctcaacggcgatgtctggagcgacttcgactactctcggctgcatcttgccgacggcgacctggcgcatctggtgctggtcgacaacccggcgcaccatcccgccggcgatttccacctggatgccggcggacgggtgggcgagacccgcgaagcgggcggcaaccttacctacagcgggatcgccgtactgcatcccgcgctgttcgagggctgccagccgggcgccttcaagctggcgccgctattgcgcaaggccatcgccgcggggcgggtcagcggcgaacactatcgtgggcagtgggtcgacgtcggtacccacgagcgcctggcggaagtcgagcgattgctggcggagcacgcctgagatgctctggcccgctacgctgatcggagccggagccggctgggccctggccagcatccccggcgccctgctcggcggcctgctggggcaactgctggaccgcaggttgcatctggagtcctggcgcggcctgctggcgcgcttgcgcgggcgggcggtgaacgatgaggacgacctgctgttccagttgctcggctatctggccaagagcggcgggcgggtggaggagatacatatccgccaggcgcgcgaggagatggcgttgcgcaagctcgataggcgagcccagcggcgtgccatcgcgtccttcggcaagggcaaggccggcatcgcccatctgcaggcggaggtcgcgcgtctgaagggcgaacgtgcggaggcagtattgctcgcctgctggcggatggcctgggctggcggcgtgctcagccagtcggcgcgacaactggtgttgcaatgggggcgctggctgggttggtcggcggagcgaacggaacgcttgtcggcgcgggtcatgccgaagcggacgcgcgctgtcgcccgggatagctaccgtgaggccctgctgctgctcggcgtggaggccggaagcgagccggcgctgatcaaacgcgcctatcgcaagctgatcagccagcaccatccggacaaactggcgggagccggcgccagcgtcgagcgcgtgcgtgcggctaccgagaaaacccgtgaattgcaggcggcctacgccctggtccgagagcgtgaggggttccgctgatcactccgcaggtttctgcgcatcggcctgcaggtgaaggctgagccagccgcggattcgtcggtacagttgctcctgctccgccttggggtcggccggtagcgcctgcatcgcgatttgtacgtaggccgggtgtttctgccgcttgccggcctgcatgcgcagcctggccgcctcgcggtcggcgcgggcgtcgcggtaatagaagtcgccggtcgccagtttcagcttcggcaccatatcttccagcgccgggcgaaaatcgcgcggtacctccgcggcaaccagcagcaggttgtggatttccgcaggctccttctccgccaggtagcgtgccgcccaataggcgcccgtgccatgaccgagcaggacgacgcttttgggttcgtgctgcagggccaggtcgatgctcgcctgcaggcgcgccatgacccgttcggcgtgcgccttgcgctgctcgaccggatcgatggctgggggaggggcctggtcctcgctctgcgccggttcgccgctgccggcttcggcggtgctttccggcgccggcgcgttgccgctttcgcctttcacgtcaggcttgcttgcgctgtccgcggcgctggcgtccttgtcggcgctggcgctggcggcggattccgcagggcgggtaaccggcgcggtgctctgcgggtcgggcagggccaggctcagggtctgccagccggcatccggcagtttgcgccttagcgggccgatggcttgcggccagtccggactttcgccatcaccgggaaccaggatcactacaccttcggcctcggcggtgttggctggcaaccagagggtgaggaagctttcgtcgccggccttgaggatctgctggccgtcctccggcaactggcgctccagccccttggcctcgtcctggctgcgctcgctgaccgccgggcgttccacgggggccggcggctggtccttggcggcctcctcttcggcttgaacgaaagccggcggcaggaaagcggcggccaatagcagcggcagcaggacggagggcttcggcagtagagagaaggccggcattggaaattcccgatagacaattcagaaggcagcctaaacccagagcacttctttgtcaggccgagccttcgcatggttcgccggtcgcgctcgcggtaaggtatgcccgcttttccttccgttgcggtgtattccgtggagtgtcgccggcatgttgcgtcgttgctgtctgctcttctgctgtctgctgttgagcctgcccgtgcgagcggaggagtcggtcgccttgccgctgacggcggagctacggacctggctggcggagcatcgggaattgcgcgtcggggtggtcaccgaagcgccctatgcccagtacgaccgccgcctgcaacagtattccggggccaacgtggagctgatgggctggctggccacggcaatgcaggtgaccttgcggtggcagggctatcccgaccaggcggcgctcgacgatgccctgcgcgctgggcgcgtggatatcgctcccggcctcagccagaccccagccgggctgcgcttgtggctgttctccgatccctacctgcgggtttcccggctggtggtggggaagcgcgatggcagcggcagcgtcgaattggagcaactggagcgcgatacccgggttgccgtgcgggccggcagttcggtagccgactacctcagcagcacctatagcggcctgcaatgggtgtcggccgattccgaacgcgaggtgctgcgcgccgtgctcgccggacaggcacgctacgcggtgatcgacgaagcgcaactcagccgcctgacccgcgaaccggagttcgccgagctagcggtggttggcgatatcggctacccgcagctgctacgggtggcgacccgtcgcgactggccggaactggcgatggtggtcgaccaggcgttgcgctcgctgccgcgcaagtccctggaccagttgcacgagcgctggttgcaacccaagtatccgcgcctcggcgagtcgccggggttctggcagaacctgtcgatcctcctcggcctgctgctggccggcgcgctggctgcggtgttcctccagcggcgccagcagcatgcgctggaagcccggctgtacggcgcccgccgcgacctggagctgcgccaggcggccgaggaggcgctgcgcctgacccagttctccatcgacaacagcaccctgggcatcctctgggtcaactgggacagccgcgtacgctacgccaaccgcgccgccgaacagatgctcggccatgccgacggccaactcgtggaccgtccgctggccgacttcgagcccggcctggacatggaccgctggttgaatctttggcgtcgtgcgcgcaatagcgaggagggcccgctcagcttcgagacccgatgcctgcgcgccgacggcagttggctgccggccgacgtctcgcttagcttcctgcgcttcggcacgtccgagtacctggtggtgttcctcagcgacgtcaccgagcgccgccgtgcccgcgaggcattgcaggaaagcgaggcgcggatgaagggcatcgcctccaacgtgccgggcatggtcttccgcctggagcgcccgcgggccggcgcgttttccgacttcgcctatatcagcgagggcagcgaggcgctggtcggctacagcgctcgcgaactgatcgaaagcggccgcggcattcgtggcctggtccatcccgacgaccgcgagcgctactggtcgagccagatggctgccctcgacgagaatcgcgactggcattggcagggccgcatcctcacccgccagggcgaattgcgctgggccgacatcaaggcttcggcgcgctgtttcgaggatggtcgcgcggtctgggacggggtggtctgggacatcaccgcgaacaagcagatcgaactcgaactcggcgagtcgcgcgcccagctccgcgagctgtcggcgcacctggagtcggtgcgggaggaggagaaggcgcgtatcgcccgcgaggtccatgatgagctgggccaggtgctgacggtgctgaagctggaaacctcgatgtgcgagctggcctatgccgatgcccaggagggcctgcgcgaacgcctgggcaacatgaaaaagctgatcgcccagttgttccagctggtgcgcgacgtggctaccgcactgcgcccgccgatcctcgacgccggaatcggctcggcggtggagtggcaggcgcggcgcttcgaggcgcgcacgcagattccctgcctggtggaggtgccggagaactcgccgcagttggtcgacgccaaggctatcggcctgttccgcatcctccaggaggcgttgaccaatgtcatgcggcatgccgaggcgcatactgtgcaactgcgtctgctgcgcgagggcgacgagctgtgcctgagcgtcagcgacgacggtcgcgggttcgatgttgccacggtggggcgtggcagttccttcggcctggtcggcatgcgcgagcgggtgctgatgatgggcggtacgctggacatcgacagtgcccccggcgagggcaccacgctcagcgtgaggattccgctgggcgtcgcgagcccgtgacaagaacaaccgccggcaaggcggaacagcgtgaggcagcaaagagtggtgatccgagtcctggtcgctgaagaccacacgattgtcagggaaggcatcaagcaactgattggcatggccaaggacctgcaggtggtcggcgaggccaccaatggcgagcagttgctggaaaccctgcgcggaacgccttgcgaggtggtcctgctggatatctccatgcccggcgtcaatggcctcgaggcgattccgcggattcgcgcgctgaacgagccgccggcgatcctggtgctgtcgatgcacgacgaggcgcagatggccgcccgcgccctgaagataggtgctgccggctatgccaccaaggacagcgatccggcattgctgctcaccgcgatccgcagggtcgccggcggcggacgctacatcgacccggaccttgccgatcggatggtcttcgaggtcggcctgaccgattcgcgtccgccccatgcgctgctctccgagcgcgagttctcggtgttcgagcggctggtgcagggcgccaacgtcaacgagatcgcccagcaactggcggtcagcaacaagaccatcagtacccacaaggcacgcctgatgcagaagctcaacgcgcattcggtagccgacctggtgcgctacgcgatggagcaccgcctgctctgacaggggcgttcgcccaggttttgctcgcggcttgtgcgccaggtccggttttcgcgatctgctgtctacctggcttccgcgcggcagggaatgatgcttgccggccaacacgataaggagaagaaacgatgttgccagccatgaggacgggcctgttgtgcgcccttctcggagttaccgcgcccgcctgggcggaatacgtgaccgtgatttccttcggcggcgccaacaaggaagcccaggaaaccgcgttctacaaacccttcaagagcgccaccggcaatcgcgtggtgcatggctcctacaatggcgacctggccaagctcaagcgcatggtggagatcagccacgtctcctgggacgtggtggaagtcgaggcgccggagctggcgcgcggttgcgaggaaggtctgttcgagaagctggacatggcgaaggtcggcgatcccgcggatttcgttcccggcgcggtgcagccctgcggagtcggcatcttcgtctggaccacgctgcttgcctacaaccccggcaaggttgcgggcagcccgcagggctgggcggatttctgggacgtgaagaagtttcccggcaagcgcggcctgcgctggggcgccaagtacagcctggagttcgccctgatggccgatggcgtggcgccgaaggacgtctaccagacgctggcgacgcccgccggcgtcgagcgggcattccgcaagctcgacgagctgaagccctatatccattggtggaagtccgggcaggaccctgtgcgcgacctggccgatggcacggtggtgatgagttcggcctacaacgggcggatcgccgcggcgcaggccgagaagcagcgcctggcaatggtctggagcggcggcgtctacgatttcgacttctgggcgctgccggtcggggtttggaagaagcagttggccgaggagttcatccgtttcgccagccagccggagcagcagaaggctttcgccgagaacatcgcctacggcccggccaaccgcaaggcggtaggcctgctcgatccgcaagtggctgccaacctgccgaccgcgccgcagaacatgcagaacgcggtgggtatgaacgtggccttctgggcggagcacggcgaggccctggagcagcgtttccagaactgggccaagcgctgaggaggccgttgcgcgccagccggagagcgctggcgcgcaaacctttgctcttctcgaaagctccttcccagagcggtctggcccattccggggggcatcttttttgtagggcgattcctacaaagagctttcctttcccctgatagaaaactctcttgccggccgatttgcgtcctgcgccgggttctctaggctgttcgcacagcatccataaaacgaacaaaggtgcggttatggccgagactcaaggcggcgatgtgctggtcagcttccgtggcgtgcagaagagctacgacggcgagaccctcatcgtgaaggatctcaacctggacattcgcaagggcgaattcctcaccctgctcggcccctccgggtccggcaagaccaccagcctgatgatgctggccggtttcgaaacccccaccgccggcgaaatcctcctggccggtcgctcgatcaacaatgtccctccgcacaagcgcgacatcggcatggtgttccagaactatgcgctgttcccgcacatgaccgtggccgagaacctggcctttcccctcagcgtccgtggcatgagcaagaccgacgtgaaggaaagggtcaagcgcgcgttgtcgatggtccagctcgacgccttcgccgggcgttatccggcgcagctttccggtggccagcagcagcgcgtggcgctggcccgcgcgctggtcttcgagccgcaactggtgctgatggacgagcccctgggagcgctggacaagcaacttcgcgagcacatgcagatggaaatcaagcatctgcaccagcgcctcggcgtcaccgtggtctacgtcacccacgaccagggcgaggcgctgaccatgtccgaccgggtggcggtgttccaccagggcgaaatccagcagatcgagccgccgcgcaatctctacgagcagccgcgcaacaccttcgtggccaacttcatcggcgagaacaaccgtctatccgggcagcttctcagttgcgacggcgagcgctgcgtggtcgggctgccgcgcggcgagaaggtcgaggcgctggcggtcaacgtcggccagccgggcgagccggtgaccttgtcgatccgccccgagcgggtgcgcctgaacggtgccagcgagtcttgcgtcaaccgtttctccggccgcgtggccgaattcgtctacctgggcgaccacgtgcgtgtgcgcctggaggtctgcggccgcgacgacttcttcgtcaagcagccgatcgccgagctggacccgacgctgagcgtcggtgatgtggttccgctgggctggcaggtcgagcatgtgagggcgctcgaccctctgccggcggcgtgagcgccggcagtcccgaaccgtaccgaagcaaccctgcactgtggagagaacaataatgtcgaaatccctgaaagcggccagcctgaagttcgccaccctggcggccggcctggcctgcgcggcccaggccatggcggtggacctgaccgtggtgtccttcggcggggccaacaagagcgcccagatcaaggcgttctacgagccctaccagaaagccaccggcaacaggatcgtcgccggcgaatacaacggcgagatggccaaggtcaaggccatggtcgataccaacagcgtgtcctgggacctggtggaagtggagtcgccggagctgtcgcgcggctgcgacgaaggcctgttcgaggaactcgacccggcgcagttcggcaagaccgaggacttcgtgcccggcgccatccaaccgtgcggcgtgggtttcttcgtctggtccacggtgctcgcctacaacgccgacaagctgaaaagcgcgccgaccagttgggcggacttctgggacatcaagaaattccccggcaagcgcggcctgcgcaagggcgccaagtacaccctcgaattcgccctgatggccgatggcgtggcgccgaaggacgtctacggcgtgctcgccaccaaggaaggccaggatcgtgccttcaagaagctcgacgagatcaagtcgagcatccagtggtgggaggcgggcgcccagccgccgcagtacctggcttccggcgatgtggtgatgagttctgcctacaacggtcggatcgccgcggtgcagaaggaaagcaacctgaaggtggtatggaacggcggcatctacgatttcgacgcctgggccatcccgaagggggcgaagaaacaggaagagaccctgaagttcatcgccttctcggtgcagccccagcagcagaagacttactcggaaaacatcgcctacggtccggccaacaagcaggcggtgccgctgctggacaaggccctgctgaaggacatgccgaccactccggaaaacatccagaaccaggtggcaatggacgtgaccttctgggccgactacggcgaacaactggaacagcgcttcaacgcctgggcggccaggtaatcctcgcctgaccctccagtgagggccggaggggccgccgcgcggcggctcctcctaccgttccacactttccagggtcgttcccgacggcccgctttttttccggagttcgctatggccacagctgtgcccatgtcccaggccaccggcagcaccctcaagcaacgcctggcgcgcgccgagcggatgaaccgcctgaagtcccaggcgctgatcctgcccctgctggccttcctggtcctgaccttcctggtgccgatcgccgcgctgctctacaagagcgtgtccaacccggaagtggttcgctcgttgccgctgacggtagaggccatctccgcctgggacggcaagtcgctgccggccgacgccgtctacaaggcgctcagccaggatctcgccgaggctcgtcgcaaccagaccatcggcgatctctccaagcgcctgaacatggaactggccggttatcgcagcctgatggcgaagaccgcgcgcaagctgccgttcaaggaggagcccgcttcctacaaggacgccatggagcagctcgacgagcgctggggcgaccccgcctactggcaggtgatccgccgcaacgccggcagctatacgccctattacctgctcgcagccctcgaccaccggatcgacgatctcggcgaagtggcgcgcgccaccccggaccaggccatctacctggacatcttcgcccgcaccttctggatgggcgcggtgatcaccgtcatctgcctgctgctggcctacccgctggcctacctgctggccaacctgccgacgcgcaagagcaacctgctgatgatcctggtcctgctgccgttctggacctcgatcctggtacgtgtcgctgcctggatcgtcctgctgcaatcgggtggcctgatcaacggcgcgctgctcaagctcggcctgatcgaccagccgctgcaactggtgttcaaccgcaccggcgtatacatcgcgatggtgcacatcatgctgccgttcatgatcctgccgatctacagcgtgatgaaaggcatttcgccgagctacatgcgcgccgcgatttccctcggctgccacccgttcgccagcttctggcgggtgtatttcccacagaccgtcgcgggcgtcggcgccggttgcctgctggtgttcatcctgtccatcggctactacatcaccccggcgctgctgggcagcccgaacgaccagatggtcagctacttcgtcgccttctataccaacagcaccatcaactggggcatggccaccgccctcggcggcctgctgctgctcgctaccctggtgctctacgtcgtctacagctggctggtgggcgccagccgcctgcgcctgggatagagcgccttccgagaaggccaaccgattcccctctcccttcggaaaaaaggctgcccggagggcggggagagggggatccgcacgaaacacattggagagcgagtcatgctgagtccctacatgtccccggtcgagcgcctgtggttctactccctgcgcatcctctgcggcctggtactgctgttcctggtactgccggtgctggtcatcgtgccgctgtcgttcaactccggtaccttcctggtctacccgctgcaagggttctccctgcgctggtacgccgacttcttccagtccgccgagtggatgcgctcgttgaccaacagcatgatcgtcgctccggcggcgaccctgctggcgatggtcttcggcactctggcggcgatcggcctgacccgcggcgagttccgcggcaaggcactggtgatgagcctgatgatttcgccgatggtggtgccggtggtgatcatcggcgtggccagctacctgttcttcgctccgctcgggctcggcaacagctacctgtcgctgatcgtggtgcatgcggtgctcggcgtgccgttcgtgatcatcaccgtctccgcgaccctgcaggggttcaactacaaccttgtgcgcgccgccgccagcctcggcgcgccgccgctgaccaccttcttccgggtgaccctgccgctgatcgctcccggggtgatctccggcgcgctgttcgcattcgccacctcgttcgacgaagtggtagtgaccctcttcctcgccggccccgagcaggccaccctgccgcggcagatgttcagcggcattcgcgagaacctgagccccaccattgccgccgcggcgaccttgctgatcggtttctccgtactgctgttgctgaccctggaatggctgcgcgggcgcagcgagaagatgcgtaccgcacaacccggcgcctgaggcgcagggcgcgccctgcttggtccgggcgtcggctgctgcggcgaaaagtcgtcattttcaccgccaaaaaccgataacggctacaatgcgcgccttccgtgatcccctttgaggtgcgccatgcaacccttcgccatcgctccgtcgatcctttccgccgatttcgcccgcctgggcgaggacgtggacaaggtgctcgccgccggtgccgacatcgttcacttcgacgtgatggacaaccactacgtgccgaacctgaccatcggcccgatggtctgctcggcgctgcgcaagtacggcgtgagcgcgccgatcgacgtgcacctgatggtgtccccggtggatcgcatcatcggcgacttcattgaagctggcgccacctacatcaccttccatccggaagcttcacagcacatcgaccgttccctgcaactgatccgtgacggcggttgcaaggcgggcctggtgttcaacccggccactccgctggaggtgctgaagtacgtgatggacaaggtcgacatggtcctgctgatgagcgtcaaccccggcttcggcgggcagaaattcatccccggtaccctcgacaagttgcgcgaggcacgcgccctgatcgatgcctccggtcgcgagatccgcctggagatcgatggcggcgtcaacgtcaagaacatccgtgagatcgccgcggcgggcgccgataccttcgtcgccggctcggccatcttcaacgccccggactacgccgaggtcatccgcgccatgcatgccgaactggcccaggcgcaccagtaatgagcgctgcggagccgttcttcgccacgcgcctgccgcgtctggtgatgttcgacctggatggcacgctggtcgattccgttcccgacctcaccgccgcggtcgacagcatgctcgccagcctcgggcggccgccggcgggcatcgagaaggtccgccagtggatcggtaacggcgcacgcgtcctggtgcgtcgcgccctggccggaagcatcgagcacgacggcatcggtgaggaggaaaccgaagccgcgctggcgttgttcatggaggcctatgccgacagtcatgcgctcaccgaggtctaccccggcgtcgtcgacaccctcaagtggctcaagcgcaacggcgtggaaatggcgctgatcaccaacaagccggagcgcttcgtcgctccgctgctggatgagatgaagctgggtcgctattttcgctggatcatcggcggtgacaccctgccgcagcagaagcccgacccggcggcgctgctgttcgtgatgaagatggccggcatcgagcccgaagatgcgttgttcgtcggtgactcgcgcaacgacgtgctcgccgccaaagctgccggcgtgcgctgcgcggcgctgacctatggctacaaccacggccggccgatcgccgaggaagcgcccaccctggtcatcgacaacctgcgcgacctgctgccttgcgccgaccaggccgctgagatagtgttgccggacgactccctttccccctccgaccagcgagatcaagccgtggcggtcagcaaactctggatgaaggtcatcaaggccctggcgcgttggcgctggcgcgcctgacatcatcctccgccggatagccggcgcgcgtttgcactctgttgaccgttctctcctccgatgaggctgatcatgaatcgcgaagaattcctgcggctggccgccgatggctacaaccgcatcccgctgtccttcgagacccttgccgacttcgacacgccgctgtcgatctacctgaagctggccgacgcgccgaactcctacctgctggagtcggtgcagggcggcgagaaatgggggcgctattcgatcatcggcctgccgtgccgcacggtgctgcgggtctacgaccatcaagtacggatcagcatcgatggcatggaaaccgagcgcttcgattgcgccgacccgctggctttcgtcgaggagttcaaggcgcgctaccaggtgcccaccgtgcccggcttgccacgtttcgatggaggcctggtcggctacttcggttacgactgcgtgcgctacgtggaaaaacgcctggccacctgtccgaacccggacccgctgggcaacccggatatcctgttgatggtgtccgatgccgtagtggtattcgacaatctggccgggaagatccacgccatcgtcctcgccgatccctccgaggaaaatgcctacgagcgcggccaggcacgtctggaggagctgctggagcgtctgcgccagccgatcaccccgcgtcgcggcctcgacctcgaggcggcccagggtcgtgagccggcgtttcgtgccagcttcacccgcgaggactatgaaaacgcggtaggaaggatcaaggactacatcctggccggcgactgcatgcaggtggtgccgtcgcagcgcatgtccatcgaattcaaggcggcgcccatcgacctgtaccgcgcgctgcgctgtttcaatccgacgccctacatgtacttcttcaacttcggcgacttccatgtcgtgggcagctcgccggaggtgctggtacgggtcgaggatggcctggtgacggtgcgcccgatcgccggtacccgtccgcgcgggatcaacgaagaggccgacctggcgctggagcaggatctgctgtcggacgccaaggagatcgccgagcacctgatgctgatcgacctggggcgcaacgacgtggggcgggtgtccgacatcggcgcggtgaaggtcaccgaaaaaatggtgatcgaacgttactccaacgtcatgcacatcgtgtccaacgtcaccgggcaattgcgcgaggggctcagcgcgatggacgcgctgcgggcgatcctgccggcgggtacgctgtccggcgcgccgaagatccgcgccatggagatcatcgacgagctggagccggtcaagcgtggagtctacggcggcgcggtcggctacctggcatggaacggcaacatggacaccgccattgccatccgcaccgcggtgatcaagaacggtgaactccacgtgcaggccggcggcggtatcgttgccgactcggtgccggcgctggagtgggaagaaaccatcaacaagcgccgggcgatgttccgcgccgtggcgctggccgagcagagcgtcgagtaagacggcgcgaggcggaagaaaagaaggcggatggcgtttgcgccatccgcctttttatgcccggctggtccctcgcattggcttcgccctacgcggaaccgctttcgtagggcgaatatcgcgacgcgatatccgccaggcggagcatggtgtcgctccctacgatgctggcaacggcgggccgctcaggatgcgatgctgtccgcgcctggctgtgctcgacgggcgcttccggcttggttcgcgcgctggtcgacgtaggcggcgaggtgatcgagggccacgaactgcatggccttgtggctatcgtcgagggtcgtcactggcagggcgatccgcccgcatgccagggccttgctgaagttttccttgttcaggttgcgaaaccagcgttcgcggacctgctccagcggcaccaggacgtcgccgaagatgcggtagaccaattccacggtttcctggcgtggaattggagtgctaggggcgatggttggctgcacggtattccctcctgcggctacgcgtcgttgaaggaaatatagctcaggttgtttttctgtgcaatagctggagttgtagtgcgggcgagcgccaggcgctcaccgcaccagggacggggcgcgccggtggcgtacggtggaccaccagaagacccagccgatcatgctgatctggcggctgcgcatgtcctccggcgagtactcctcgtccgggtattcctcgcggttgaagctgcgcagccgaatgccgccgccgggcaggcgatagacgaacttcacccgcagcatgccgtcatgttcgagggcgtagatctcgccatcggtgatatgggtggtggcggtgtccacgccgatggtggagccatccatgatcagcggttccatgctgttgccggtgagttgggcgcagatcgccgccgacggatcgacgcccgaggctcgcagcgtggcataggaaaaacgcagcttgcgcccctctatctcgcgtaccgcagtgcgtccggcgccggcggacatctccacttccttgtacagcggcagttccacttcgtcttcgtccagcggtgtgtcgctgtcccacggatgcagcggttccagcaccaatgggctgccatcggccacggacacggcactgcgcgcggctggagcgccttcgccggtctgcagccagaccggcgagacgcccagggccgccgcgatctcgatcagcttgcgggtgctctgggccttgcccgaggtcagcttgtgaatggtgttctgcgaaacccctgccgcttcggcgagggtttcctgcttcaggttgcgcatcgccatggcctgcttgaggcgagcggcgaagctgtcgggcgggatctgggtgctcttgtccatgttcggcaatctacagaccgatggattctctgtaaagagcctaggtgttgacgataaatagctttggttgtaatttctcttccgtcagaaagcggaaggggtgagttccacaacttcccacccgcctttcagagatttcacatgggtgcagggacgcacccggttgtcggtgaccgacgatgcaggtgccgactgcttgggtgccggggctatgggaaagcgctccggcacctggagggccggagcgccgtccatgcagacgctccgtcccgctcattcattctgtcgccgacctgcttcaggtacggcggcgtcgtacagggagtcattgccatgtcgcgagatacgcactcgccatttccgcgcagaggaacgcaggtcgccgaaccggcgccgcgcatctgtcatgttccatccattcggccgtcgggcgtcgggcacgccagggaggctttccatggctgaccttgccgatcacgccaacgaactggtcctggctcgcctcgacggcctcctggcggcgcgcccggcgctggccatccgcgagtccgcggaagactgcgaggactgcggcgagcccattccccaggcgcgccgccgggcggcaccgggttgcagtcgctgcatcgactgccaggaccgccacgagcgccgttgaaccgacctcatgccgagccctcgcgggcagtgaaaggagacacgaccgtgatcaaagccatcgatgaaatgctcaagctctgggccgaggaaatgcacgcgccaggcagcaacggaggcggctacgccggcggcaacctgatcgccatgctgatcgccagcaagggcgaggtggtccgcggccaccgtggcagccgggtgatcctcgaccgtgtggcggaggtcgatcgtctggtaaatcgcctacccgaggaactgaagaccgtggtggtggagcactatctcaatcgcgacagcttccccgagcagaagtaccgtcactgcggttgcagccgcaacaccttctatctgcgcctgcatgtggcgcaccaaggtatccaggacggcctgctgcgacgggcggcctgagttcctggaccggatcccggtcccccctggaattttccaaccggccttcgggccggtttttttatgcctgtcgcccatggaggcggcgagccccatgcacagcagcggaccctgcacggtagaggcggggtcgggctggcgtagccatccttttcgtcagtcgatgccgggcttttccatatcggaagtggggatgcgcttgcccggatgcctggcgaaggttcccagggtggtatatcaccctcatatcgtggtgcgtctccctcctattgcagtggattgtcgagaaggcattgccgggctgggaatcgggcggtaaaaagtagtcattcttgtaaaggtgcgtccccagggaggcactcgtgaagcaccggaacccggccctggcgccgggttttttattggccgggaaaacgttcgtgcggacgtgcccggcgctgcctgccaaggagggacccatgggcaacgaaccgcagacactgacggaaatgccgctctgggtactgatcctgctcgccgcgctgggcggcgtcagcggcgagatgtggcgtgccgacaaggccggtctcggcggctgggccttgttgcggcgcctggcgctgcgctccggcgcgtcgatcgtctgcggcgtggcggtgatgctgctggcgttggcttgcggcgccgcgctgctgttcgccgcggcgctgggcagcctgaccgccgcggccggcgcggagatcgccgtcggtctctacgaacgctgggccgcccggcgcctgggggtttgcgagctgcccgaggaggagccgcatgagcggacataagtgccaggaggatcgatgaaactgaccgagcagcaattgctgcgcatttttcccaacgcccgcctcgtcgcgggcgttttcgttgcggcgttgcaacgggccatggacgagagggagatcgacacaccggcgcggcgtgccgcgtttctcgcccaggtcggccacgaaagcagccagttgacccggctggtggagaacctcaattacagcgcccaaggcttggcggcgacctggccgggtcgctatctcggccccgacgggcagcccaacgcgttggccttgcggctggcgcgcaatccgcaggcgattgccgacaacacctacgccacgcgcaacggcaatggcgacgaagcgtccggcgatggctggcgcttccgcgggcgtggcttgctacagatcaccgggcgtgccaactaccggttggtcggcgaggccctcggcgagccgctggaagccgagccctggcgcctggagcagcccgtgccggcggcccgcagcgccgcctggtggtgggccggtcacgggctcaacgagttggccgaccgcggcgagttcgctgccatcacccgccgcatcaacggcggcctgaatggccaggcggagcgcctggcgttgtggcagcgggccagggcggtgctgtcatgagccggctcgctctgctcctgccggccgtgttgctggtcctgctggccggcgccttgctcggcggcggcctggttgcccgccactatcgtccgcaactggaggaggccctgggccaactcactgccagccgcgtcgccagcggccagctcgaggctttgctcgatgagcagcagcgcgcgctggcggcggtgcgggcgagcgccgagaggcgcgcgaaggacgtcgagcaggcactcggcgaggccagggcacaggccgcggagcagtatgccgcggccgtgcgtctgctccaggaacccgacattggcgtggactgccaggcggcaggtgcggcgatcgaccgggagctgggactatgactcgtctcctgctggggctttgtctgcttttcgcgggctgcgcagcctcgccgacgacacctcgccccgtgcgcgtcgaggttcccctggcagtgccctgccgtgtacctgacgtgcgcccgccgagctgggccggcgccacgctgaaggccggcgattcgctgcaggccaaggttcgcgcattgctcgccgagcgccgccagcggcagggctatgaactcgaattgcaggcggcattgcgtgcctgccgctgagacactgggcgcatatggacgtcgatggacgtgtgtccggcgcatattgccgtgtattgattccgcagcgttgttgagccgggaatcggccggtacaacgtagtcatgcttgtacaggtgtgtccccccaagggatgtcacctgcaacctcagagcccggcccgtgtgccgggctttttcgtttgcatccgacaacggctcgggacgtggaggctcctcgccgaccgcgtgccgcgccacggccgaccgtcctggggacggggccagacgacccgcctggtgcgggtcttttcatgtgcataaaggagagttttccatgtccatcctgactcaaggtacccagatctacgccctggttccgccggtatccggtaccggtgccgctaccgtcctggagatcgaaggcgtgacttcgttcaacccgggcggcaatccggccgaccagatcgaagacccgtgcctgagcgacacttcgcgcaagtacaagaaaggcctgcgcactcctggccaggcgaccctcggcatcaacgccgatccacgcctggccagtcacgttcggttgttccagctgtccgagaaggatggcgagacgagcgtcaagtgggccatcggctggtccgacggaatcgacgtaaagccgaccgtcagcaccgaaggcgacgatttcgtgctgccgccggcgcgcacctggttcaccttcgaaggctacgtcagcgacttccccttcgatttcgccagcaacacgctggtcgctacccaggccaccatccagcgttccggcgccggcaagtggacgccgaagtcggcttgaggagcgcgtagatgaatctcaacgaacttcgtgcggcgggcggtttcatcgagtcgatgctggtgcgcaaggagattacctggacccgcgttcccgccggcaggaagaaggcggtcagcgacaccttccaggtgttcgtccgacgcaacagttttggcgcggtggagcgcctgttctccgccgaaggcgaccagcagagccgcaacgcgcgctacctcgccgaatgcattcgcctgggcgagacgggagaggaaagcctgacctacgaacaggcctacgacctcgacccggcgctgggcttcctgctgctgcaggcggtcggtgaggtcaaccgggtcgaggacgcggaaaaaaactgacccccgccgacgaggtttggcacgagctggtgctgaacggcgtcggcgggtcgaccattgccgaggccaaggagcggctcagctacgccgagtaccgcgcctgggtcgcctacctgaacaagcgcggctcgctccatccgggacaccggctggagcttgcgctggctcggatcgctgcgttgctcgggcatgcgctgggagcggacgccgatcccgacgcgttccgtccgcatatggctctccagcccctttcgctgcatcaggcgatggatcaatgggcatgacaggccaccccgctgcggcggggtctttttctggaagacatgaatcatggccacgaataccgacggcagcctgacgctcgacctggtccttcgcagcgaagggtacagggccgggatggacaaggttggcaggatcaacgatcagaaaatgcgtgccatggaggcgcgcgcggaaaaggctggcaaggctatcggcaaaagcctggacagttcggcactgattgccagcagcgtgctggaccaggcgctggacatgctgggcaggaccagtcgccaggcgggtcaggccaagaagcctgtgcagagcgcccaggacaaggtactggccgagtggaagacccggcagaaggagctgggcgaagcttggaagagctatcgcgaaccactccaggatctgtccaagctcaacgaagcactactgaagaactcttccgacaagctcgacaaggcgctgctcaatctcagcgagaccggcaagctgtcgcttgccaacgtgggcaaggccgcctacgccgatgccgcgcgcctcgcctcgcggcagatgacgctgatgctgctggacgggctgtttggctgggtcgccagcgtcggtaccgagaagcccaaggtcgacgacaaggcgggcaagggacaggcgaaggccggcgacgacgagaaggaacagccgtcgctccagtcgcaggtcttcaagcagtggctgttgcagatgaacagtgtctggagcgcctaccgcgcgccgctgcaggatatctccgggatgaccgacgagctgttcaggaatgcgtcggagaagctcgagaagtcgctgttcaatttcgccactagcggaaagctgtccttgagcaacttcgccaagacggtgatcgacgatgtcgcccggatcgccgcgcggcagctttcaatgctcgccctggacggattgttcggctggatgaatggcaaggccggcatcaccgaggcgcaactggccagccagaagccctatacctcgctactggaaaaggcccgcgcagctgcgggacaagcggcagcgggcgctcccgcggcccagggtgccgcgccaatgccggcagcggcgatggatgtcggcgcgatggtggccactgcttccgggcagaccggggacggttccaaggtctcggctggaggggcttcggccgctggcaagccggtgggcagttgggtcgaacagatggacgcctcctgggcgagcctgcgcgaccaggcgcaggacgtctcgggaatgatggacatgctgtttaccaacgccttcaccaatatggagaacgccctgttcacctttgccaccacgggcaagctgtcgttcaaggatttcgccgactcggtgatccaggatatggcgcggatcgccgcgcggcaggcgacgctgcagatcatcggcagcatcgtcggtgcggtcagcgggttcttcggtagcggcgcaacggcgggctcgcggatttccgactataccggctcggacatggccaattgggtcagcaagcaacgcgtcggaggcatgcctgggttcgccaggggcggtgccttcaacgatggcatccagagcgcgccggcgctgttcagcatggccggcggtcgtccggcgctgatcggcgagcgtgggccggaagccatcatgccgctgagtcgcggttccgatggcgtgctcggcgtgcgcgcgctcggcggcggcgagggtggcaacgtcttcaatttctccaccagcgtcagcctgggcggcggccgcgagggcgcggcgacggccagcggcgacgacggtacgggacagcagctggcgggaatgatcaacgatgccgcgcgcaacgtggtggcgcaggagctgcgccccggcggcctggtatggaggatggtgaatggctgatctggaacgctttacctgggacatctcgatcgattccgccggccaggcgaaccaactggtgcgccaggtgcagtacggcggcggctacagccaggcgctcggcgacgggctgaacaacctcagcgagacctggcaggtttcgcgtaccggcgatctcgcgctgatcggcccgatccgcgatttcctcaagcgccacggcggctaccgctcgttcctctggaccttgcccactggcgaaccggtacgggtgcgcgcccagggctggcaattgcgaccgcgcggcaacggcgtgttcaccctgaacaccaccttccagcaagtcttcaatccgtgaggtaagcatgaccatcacagccgatgaccaggccctcgagcctggggcgctggtgcgcctgttcgacctggattgcaccgggttcggcggcgagatgctgcgcttccacggccacctgcagcaggggccgatccactggcagggcaacgcctaccaagcttggccgctggaggcgcgcggcttcgagcagcgcggtgacggccgggccagttcgccgacccttagcgtgggcaacatcgacggcagcatcagcgcgctctgcctgttcttcgatggcctggtaggcgcgcgcctgaccgtgcgcgagacctatgcgcactacctggatgcggccaacttcgccgaaggcaacccgcaggccgacccctcccaggagcgcctgaacatctggttcctcgagcagaagaccgccgagaacagcgtccaggtgacctgggagctgtccgctccgccggacttccagggccagcagatcccggcgcgccagatcacctcgctgtgccactggtgcatcaccaacgagtaccgcgggcaggactgcaactacaccggtacggcgatgttcgatgccgacggcaatccggtggacgatccggcgctggaccgctgcggcggccgggtcagcgattgcaagctgcgcttcggcgcggacaacccgctgtcccacggcggcttcgccggcgccggcctggtcaggatgtgagcatggaactgagccgcagcctgcagcgggccatcgccgcacacgccgcccgcgagcatccgcgcgaatgctgcgggctgatcgttcgcggtgtgcgtcaacgccgctacgtggcctgtcgcaacgcagccggatcgcccagcgagcacttcgtgatcgatcaccaggactggtgcgctgccgaggaccagggcgaggtcctggccatcgtccacagccacccggacgttccggccacgccgagcatggccgatcgggtcagttgcgaactgcatggtctgccctgggtgatcctgtcctggccggaaggcgatgtcgcgcatctagcgccggagggctatcgggcgccgctgctcggccgcgagttcgcccacggcgtgctcgactgctggagcctctgtcgcgactggtaccgccgcgaggcaggtttggagcttccggactatccgcgccgcgacggttggtgggaaaccggcgagagcctctacgagcagcactatgcggcggccggattccggccggtgccgctggccggaatccgccgcggcgacatgctggtgatgcaggtcgggagggcgctgcaccctaaccacgcgggcatctacctgggcaatgactggcgtctggacagcgagccggtccaggcgctcggcggcgacggaccgttcctgctgcaccacctgtacggacggctgtcgacccgcgacgtgttcggtggaccctggatcgaacgcacgcgcctggtcttgcggcacacgcggatgccgcagtgaacgacatattcaagcgagccgtcggaatcggctcttcacgagaggaacaggtccatgagtgacaccctgagtcagggcctcaccaccatccgtctatacggggttctgggcaagcgcttcggccgcatgcacggccggttattggaaagcggcacggtacgcgaggcgatgagcgccctgaagcacaccatggagggattcgagacgttcatgcgcgaggcggagtcgaaagggctgaccttcgccgtgttccgcgggcgtaccaacctgtccggcgagcaactggacatgcgcggacgcgaggatatccgcatcgtgccgttggtgatcgggagcaagcaggcggggcttttccagacgattctgggggctgccttgattgtcgtgggtggattcacgacgttcttctccggtggaaccagttcgttcctggtaaccgctggagtcagcatgttggcgggcggcgtcatgcagatgctcagtccccaacccaagggcctgaagggccgcgaggcccccgagaacgcccccagctatgccttcggcggcccggtcaacaccatcgcccagggccatccggtcggcgtgctctacggcaagcgccgcatcggcggcgcggttatcagcgccggcatctatgccgaggaccggctgtagccggcaacgccgtaacaggcccgccatgcgcgggcgtttttttgcctgaaggaacgtcatgaacaagaccatcatgggccacaagggtggcagcaagaagccgcgccagccggtggagatgccggactcggtgcgctcgatcgcgcgggcgaagattctcctggcactgggcgaaggcgagttcgacggtggcgtcgacggccgttcgatctacctggacgatacgccgctgctggcggcggacggctcggtgaacttccccggagtgacctgggagttccgtccgggctcggtggaccaggaacacattgccggtgtgcccgccgtggaaaacgaactggcggtcggcgtcgagctcaagagtgacgcgccctgggtccgcgcggtgagcaacacccagctctcggcggtgcgcctgcgcctgtcctggccggccatccagcgccagcaggaaaacggtgacgtggtcggctaccgcatcgactacgcgatcgacatcgccgtcgacggcggtgcctggcaggaagcgctgaaggcttcgctggacgacaagtccaccagccgctacgagcgctcccaccgtgtcgacctgccggaggcgcggagcggctggcaggtgcgcgtgcgccgcctgacgccgaaccagaacaacaaccgcatcgccgacaccatgcgggtcgaggcgatcaccgaggtgatcgacgccaagctgcgctacccgaacaccgcgctgctgttcgtcgagttcgatgccagccagttccagagcattccgcagatatcggtggaagcgcgcggccggcgggtgcgggtgccgagcaactacgatccgcagacccgtagctacagcggcacctgggacggctcgttcaagtcggcctggaccagcaacccggcctggcactggtacgacatcgtgttgcacaagcgcttcggcctcggtcggcggatcgacgcgagcatggtcgacaagtggtcgctgtaccgcatcgcccagtactgcgaccagtcggtgcccgacggcaagggcggccaggagccgcgcttcagctgcaacctgtacctgcagagtcgcgccgaagcctggaccgtgctgcgcgacctggcagcgatcttccgcggcatgtcctactggtccggcgcggaaatggtggcggtatccgacatgccggaggacgaggcctacaccttctcaccgtcgaacaccgtgcgtggcgacgacggcagccacttcaactacagcagcagccgccagcgcgatcgccacaccctggccctggtcaactacgacaatccgggcaacggttaccagagccaaccggtagcggtgaacaatgaccgcgcgcagcgccgctacggcatcagccagttggagatcaccgcgatcggttgcacctccgagggcgaggcgcagcggcgtggccagtgggcgctgctgaccgaggagctggagcaggacgcggtgaccttccgcaccggcatggatggccgtgggctggcgccggggaagatcatcgccgtagccgacccggtcaagtccggcaagcagatcggcggacgcctgagcgcggtggatggccgcgcgctgaccctcgaccgcgacgtcgaggcccgacccggcgatcgcctgctggtcaacctgccgaacggcaaggccgaggcgcgcagcgtccagtcggtggtcggccgcgtgctgagcgtgaccgcctcctattcggagacgcctcggccccaggggcagtgggcgctgcagagcaacagcctgaccacccagcgcttccgcatcatgagcatcacccggccggaggacaaccttttcgagatcaccgcgctgcaacacaacgcgagcaagttcgacgccatcgacaacggtgcgcgcatcgagctgccgccggtcaccagcattccgccgggcgtgcaggcgccgccgcagaacgtgcggatcaaggctttcaccaaggtcgaccaggggttggcggtgaccagcctgtcggcctcctgggatgccgcgccgaacgcggtggcctacgaggccgaatggcgcaaggactcgggcaactgggtgcgggtgccgcgaacctcggcgctcggtttcgacgtgccgggcatctatgccggtcgctacctggtgcgggtacgcgccttgaacgtgatggaggtcggttcggtctacgccagcagtgaggaaaccgctctcgagggcaagaccacgccgccgccggcgctggcctacctgcgctgcgtggccggcccctggcgcatcggcctggagtgggggttcccggccagcggcgcggcggacaccgcctacaccgagatccagcagtccgccacgcccggcggcagcgaggagaccgcacgggcgctgggcctgttcgcctacccaggcaatacccacctggtatcgccgataccggccggcgaacggctggcgttccgcggtcgcttgatcgaccgtagcggcaacgtcggcgcctggtcgaactgggtcaccggcaccagctccagcgacgccagcgaatacaaccagttgatcacccaggagtacgtcgagtcggcgctgggccagcaatttttctccgatatcgagcggatgcaggtggatatcgggggcttgcagaagcaggtcggcgacctcgccgacattctgctgtacgacccggccaaggtctacgcgaagaacgacatggtgcgacaggggcagcggttgtaccaggcactgaaggctgtgccggcgaagacggcgccgccgaacgcggcctactggtccgatatcggccagtcgctggaaaccgccaacgggctggcgcagcaggtggcgagccataccgctgaaatcagcgaactcgacggcagccttaccgcccaggcatcgcgccttggcgtactgcaggcggcgacccgtgacgacgcggatgacggcaatggcgccatggccgatgccctgcgcggctggaaggccgttgcccgggcagcccaggaggaaaccgtacgggccaccgaaaacgaggcccaggccactcgcacgacgctactggaggcgcgcaccgccgatgccgaagggcgtatcgccacggtggaacgggtcgcgaccagcgatcgccaggccaccgcgcaacgtctggaccagctctcggcctcgatcggtggcaccgccgccagcctacagagcgaacagaccgcccgcgccaacgccgacagcgtcctcgcacagcggatcgacaccgtgcaggcgagcaccgacaccaatagcgcagcgatccagaccacctcccaggcggtcacctcgctggatggcaacgtcaaggcgatgtacagcgtgaagctccaagcgcatgccaatgggcagaagtatgcggcgggatggcaactggggttcgacagtgggacaagtgtgtcgaccatggcgtttcaggcggatcggtttatctggttcgacagctccagcgggacggcggtagcgccggtttccattgttaatggacagatgtttatcaagagcgccctgattcaagatggaacgatcgataacgcgaaaattggcgacgagattgcgtctaataattataagccagaccgaactggatggaggctcgataagaatgggaggtttgaaataaatggagttgtcgaggggcaggggcgggtgacaataacaaataatgctataaaggttttcgatgataaagggcggcttagggtacatattggagacttgagtgcatgagtcacggatttcggttttacgacgcccaggggaatctgatgatcgactcttccagtcgtagttttcgttctgtgtttcgggcgcaggtttttccaatagagaacggtagatatgatctaccttctacctatgatgattccttgggggacttattcttcttcactggttacagagatgatggctgggggtggctcgctccagaatatacatggctgcctggttggaagtatattatctggcgtagtggtggttctcagggtggtcccgcacgtcattggatcaatgtggtgagtacaagatgacttatggtgttcgtctagtcaatgatcgggatcagataaatgtagatgacaataatccaatctattatgtggtgcaggagggggtgtatacgcaaactgttaaatacccaaatagtattgtgttcgatgaaagttacaggcatacccttcagaccccgctggtttttgtgaaaccaaatgccggtggcggtcagttgtgcatgttactgaagtattttggatctgctggtaattggcaggggtgtgagtggcataccactactgttccaggtgcagccccaggcgtagtaggagggagatacaaggtagttgttccctttatgccaaagtctactggctgggggatgcatgttatggactccgctggacagattgtatttgactctggctataagcctgcgatattcaccggagggtcccagtactggacctactatgcttggaaccctaaccctcctgggggcggtggttcaggggtgaactcttggcagtcggttccaggtatgcctgcggatacctatttctgtatcactggtctgatggaggactgggatggtagaaacacaatgataggtgacctctggggtaatcgccaatatttgtatgtggtgcagtggagaagttatcagaataaaggagtttatccatctccactgctgatgattaagtagaaagtttggtgcatgcggttattaaattgttgcctctttcttgatataaaattaaattttaggattgcttgcgagctaggggtgttgaatgtatttttggtgtttttaaattttgcatgaaatgggttttctcatgtttgagtttttggtgtattataatgccaagtgggatgactgatgttaattctttttgttggttgcttattaatttttttgctgccactgaaggcaggtttttgtagtgccgtcaagtgactttcgtaaatatgctggtttcattaatgtgcatgggtgttatgttgcctcggggacgtaaagctatataattacttattcgttgcttggatattcaagcttcccattcgcaggggctcgatcacgaggtctggaaagcacctgctcaatcctgccaatcgcagtttttattatctggagaacgtcatgccttggtattccacaggcacggtttccgtcgtcctcaattcggacacggtgaccggcagcggcaccgccttcagcgccaatgcgcgcgccggcgatgccttcagagggccggatggccgctggtacgagatcggcaacgtcagcagcgccaccgtgctgaccatcaagcccgcatatcaaggagctaccgccaacggccaggcatattcgatcaccccggtgcagggatattcgaaagcgctggcggatcagcttcgcgatctcaacaatctgtggggaagcaccctggcagcggtcaaaccgtgggctactgcggcgaccggccccgccgccctggatgacatgggcttcggcgtaacgggcaaggccctggccgtcagcgccacgccagttgcagccagatccgctttgggggtgcctgccgtgggtgactatggaatcggcctgacggcgggaagctccaataccttgagcgatgccaatgtggtcattcccaacggtatttaccgtgtagcatcgactaccgcagggaccatgctcggctcctatatcggacagatgctccatgccgagcaacagggtggatatggcgtgcagttggtcatggcggcgcagacccccccgcagatgcgtatgcgtgtaaagaatgcgggagcctggcaagcgcctgtggacatcttgaccagtaatgacgcggcgaatatgccgttggttaacctgatgcccgattctggacgctatgccgggacggtcaatccactggcgattactctcgcgcagccgtgggcgaatagcacattcagttcggggtggaacggagcatctttcatggatggaggaaagttcacccatgacaacagcagcaatggaggtggtggtgctgaactgaatgctcggatccagagtttgctgcagacgatggggcgcagtgcaggaggggcgcgctatggtgtcgagttccatgtcgctgtgatgacggcgggaattggacgggcgaatgagtccgttgggctggatggcggaagtcgcttcctggcgatgaccaacaacagcagagcactattctgcagcaatcaatgggctacggtggtcatgtgggttcgggttgaaagtggctccatgcatatcgcgacgccggcacagaccacggtggctgtttggatcaatggcgccgcaaagtccccgggtcatgtcttgacaccagccgaaggctgggttcacgtccgggtggcgacacgggcctggggtggctacgataacgcgttcccctatttccacaccgtaccgggatccgcagtggctatggcttgtccggcctggttcggcgggctagcggatgtcggcatccatacagctcctatcgccacgatcaatggagccagcgcagcatgatgaaacgaatccttctcgatggcgaactatttgccgaaaactcgttatcaacccttgccgaagtagcgatcttggccgatatcgatgtatcgcgcctgtccttccaccctgacgaccttttcgccgaagctaataaaaaacgccaggacgcctatcgcctggaaagcgatccgctacgtttggaggcggaatacgatgccctcaaggccggcagcgagccggactaccgagcctgggtggcaaagatcgacgagatcaaggcgcgatatccgttgccttgaaagcgcctgtctaattcaggtgccttggcgtctctttaatgcacatttccgtcagcaattccttacacgccggcctcctcggccggcgctcttcccgacatcccgctgttgcacccatcctccccactgggctatgttccccaacatggctccgtgagaccgctatcgtgatccacctcagcagcatcatcacctccctcatcaaggcattcgcccgttggcgctggcgcgcctgacttcttcttcgccggcctggccggtcacgtctccctgcgtcccccgttttccacaggcataatgccgacgatccactcccccttcctccgcgagcgcgccgggaaccgggtgtggcgaaagccgggtgatgcgattcgcataagaatgaaatcaagaggttacagccagcatgctgctgatgatcgataactacgactccttcacctacaacctggtgcagtacttcggcgaactcaaggccgaggtcaaggtggtgcgcaacgacgaactgagcgtggaacagatcgaggccctggcgcccgagcgcatcgtcctttcccccggtccctgcacccccaacgaggccggcgtctcgctggccgttatcgagcgcttcgccggcaagctgccgctgctcggtgtctgccttggccatcagagcatcggccaggccttcggcggcgaagtggtgcgggcgcggcaggtgatgcacggcaagaccagcccgatccaccacaagaacctcggcgtgttcgccggcctggccaatcccctgacggtgacgcgctaccactcgctggtggtgaagcgagagagcctgccggagtgcctggagatcaccgcctggacccaacatgccgacggatcgctcgacgagatcatgggtgtacgccacaagaccctgaatgtcgagggcgtgcagttccatcccgagtccatcctcaccgagcagggccacgagttgctggcaaacttcctccgccagcagggcggtgtgcgtggggagggcaactgagatggatatcaagggagccctcaatcgcatcgtcaaccagctcgacctgaccaccgaggaaatgcaggcggtcatgcgccagatcatgaccgggcagtgcaccgacgcgcagatcggcgccttcctgatgggcatgcggatgaagagcgaaaccatcgacgagatcgtcggcgcggtggcggtgatgcgcgaactggccgacggtgtgcagttgcctacgctgaagcatgtggtcgacgtggtcggcaccggcggcgatggcgcgaacatcttcaacgtatcctcggcggcgtccttcgtggtcgccgccgctggcggcaaggtcgccaagcacggtaaccgcgcggtctccggcaagagcggcagcgccgacttgctggaagccgccggcatctacctggaactgacctccgaacaggtggcgcgttgcatcgacaccgtcggcgtcgggttcatgttcgcccaggtccaccacaaggcgatgaagtacgccgccggtccgcgccgcgagctgggcttgcggactctgttcaacatgcttggcccactgaccaacccggcgggagtcaggcaccaggtggtcggggtgttcacccaggaactgtgcaagccgctggctgaagtgctcaagcgtctcggcagcgagcatgtgctggtggtgcattcgcgcgacgggctggacgagttcagtctggccgcggcgacccacattgccgagttgaaggacggcgaggtacgcgagtacgaagtgcgtcccgaggacttcgggatcaagagccagaccctgatggggctggaggtcgacagtccgcaggcctcgctggaactgatccgcgacgctttggggcggcgcaagaccgaggctgggcagaaggccgccgagctgatcgtgatgaatgccggcccggcactgtacgctgccgatctggcgaccagcctgcacgagggcattcaactcgcccacgatgccctgcacaccgggctggcacgggagaagatggacgaactggtggccttcaccgccgtttacagagaggagaacgcacagtgagtgtgccgacggttctgcagaagatcctcgcccgcaaggccgaggaggtcgccgagcgccgtgcgcgcgtcaacctggccgaggtcgagcggctggcgcgtagcgccgatgcgccgcgcggcttcgccaatgccctgctggagcgggccaagcgcaaggagccggcagtgatcgccgagatcaagaaggcatcgccgagcaagggcgtgctgcgcgaacacttcgtcccggcggagatagcccgcagctacgaggcgggtggcgcggcgtgcctgtcggtgctcaccgacgtggacttcttccagggcgccgatgcctatctgaaggaagcgcgggccgcctgtgcgctgccggtgatccgcaaggacttcatgatcgatccgtaccagatcgtcgaggcgcgggcgatcggtgccgactgcatcctgctgatcgtctcggcgctggacgacgtgctgatggccgaactggcggcgactgccaagtcggtcggtctcgacgtactggtcgaagtgcatgacggcaccgagctggaacgtgcgctgaagaccctggacacgccgttgatgggcatcaacaaccgcaacctgcacaccttcgaggtgagcctggaaaccaccctcgacctgttgccggaaattccccgcgaccgcctggtggtcaccgagagcggtattctcaaccgggccgacgtggagctgatggaagtcagcgaggtctacgccttcctggttggcgaggcgttcatgcgggccgacgatcctggcctggagttgaagcgcctgttcttccaggagcgtggcggcgtggtgctgggcgccgatcctgactgatccgcgctgtcgaatcccatgaaaaaggccggttgcgaccggcctttttcatgggtgctgttcagcgggtgccgaagaccaccatggtctttcctttcacatgcaccaggccctgctcctccaggctcttcagcacgcgtccgaccatttcccgcgagcagccgacgatccggccgatctcctggcgggtgatcttgatctgcatgccgtccgggtgggtcatggcgtccggttgctggcacaggtccagcaaggtgcgggcgacgcgtccggtgacgtcgaggaaggccaggtcgcccaccttgcgggtggtcttgcgcaggcggtcggccatctggctgccgagggtgtagaggatctccgagtcctgctgcgacagttcgcggaacttcgcatagctgatctcggcgacttcgcattccaccttggcgcgaacccaggcgctgcgttcctgttcgctgccttccttttcgaacaatcccagctcgccgaagaaatcaccgctgttgaggtagccgatgatcatttcgcggccgtcgtcgtcctcgatgaggatggtgaccgaacccttgatgatgaagaacagcgtttcgcagcgatcgccggcatagatgatggtgctctttgcggtgtagcggcggcggtgacagtgtgcgagcagcttgtctaggtgtttgagtttgggtgtgtgggtaatagctaccatgcccgagtcccgaaagaataaagaatatgcctgacgtacaaggcgatgtttttttgagttcttatggagagacctgccagggcccgggagctcagcggagagctccccccaaccgggcagatcaggaagtgtgccagtaaaccgcgtccagcttaacagacgggccatgaaggtcgatgtgattttgcgacgcagctatcaggactgtgatcccgtactgtccttgggccctgtgctaagctggcgccctttgccggcgggagtctgaacgatgaaagcgcgtatccagtgggcgggcgaggcgatgttcctcggcgagtccggtagcggccacgtggtggtcatggacggtccgccggaccatggcggacgcaacctcggggtgcgccctatggagatggtcctgatcggcctcggcggctgcaccaacttcgatgtggtcagcatcctgaagaaggcgcgccagccggtggagagctgcgaagccttcctcgaggccgaaagggccgacgaggagcccaaggtgttcacgaagatccacgtgcacttcgtggtcaagggccgcggtctcaaggaggcccaggtcaagcgcgcggtggagctgtcggcggagaaatactgctcggcgtcgatcatgctcggtcgcggcggggtggagatcacccacgactacgagatcgtcgaactcggctgagacgacatccggtcatcataaaaggggcgcaaactctggcggaggcttgattggctctgcataatgcgccccttttttcgtgccgcgcgattccgtcgggcggccgttcagttcggaagattcttccgctctgatagacgtttcccgagccatcccggtcgggtgaccaatggcgccagccggcgcccgtgcaactcaacaaaccacaatcgccatcgcgaagaggtgttaaccgtcctacgcaggtgcgtcgttcgcatctgacgggcatgccccaaccctgcggcagagccgcaagcaaccgagagagttccccacggtgaaaagcaaactcaagctccacgggttcaacaacctgacgaagaccttgagcttcaacatctacgacatctgctacgccgagacgcccgaagacctccaggcctacgtgcagtacatcgacgaagagtatgacgcggagcgtctgacgcagattcttaccgatgttgtcgacatcatcggcgccaatatcctgaacatcgcgcgtcaggactacgacccccagggcgccagcgtgaccatcctgatctccgagcagccggtcactccgaccgacagccagatcgaagagtccccgggcccgctgccggacaccatcctggcgcacctggacaagagccacatcaccgtgcatacctacccggaaatccatccggtggacggcatcgcgaccttccgcgtggacatcgatgtgtccacctgcggagtgatctccccgctgaaggccctgaactacctgatccaccagttcgactcggacatcgtcacggtcgactatcgggtccgcggcttcacccgcgacatcgaggggcgcaagcatttcatcgaccacgagatcaactcgatccagaactatctctccgacgacacgcgcgaggcctaccagatgaccgacgtgaacgtgtaccaggagaacctgttccacaccaagatgctgctcaaggacttcgaactggagaactacctgttcggcgacgctacccggacgctctcgacggaacagcgcgagcaggtcacggaacggctcaagcacgaaatgctggagatcttctacgcgcgcaacatgccgcgctgatcgcacacgagaaagaaaaagcccgcttcgagcgggctttttcatgcgtgcgattcagatgcggtaggtgctcttggtcatcaccttcgccagcaggctcatgcccagcttcaccggtgccgggaagcgcaggccgccggcggccagggcgttgctcgaatgctgttcctcgtcgatacgcatctgctcgaggatggcacgggatttccgatcctcctggggaatctgcgccaggtgttcgtccagatgcttgcacacctggtcttcggtggcggcgacgaagcccaggctgacccggtcgctgaccagcccggcggcggcaccgacgccgaaggacaggccgtagaagatcggattgagcacgctgggacggctgcccaactggcgaatgcgttgctcgcaccaggccaggtggtcgatctcctcctcggcggcttcctccatcgcctcgcggacctcgggcagcttggcggtcagtgactggccctggtacagcgcctgggcgcagacctcgccggtgtggttgatgcgcatcaggccggcgatatggcgggtgtcttcctcgctcagttcgccatcgggttccacgatggccggcgacggtcgcgccggctggccgctgaacggcagcagggtgcgcagggcggagtcggcctgcagcaggaaacggtcgatgggcgaatagtggcggtcggcggacatggcgcacctccggaaacgaaagatcgcaccagtttaccggaagtgcgctgatagcaggatgttgcggacgggctgcgatgtcgcagcgccagcagggactcagcccggcggccagtgcatctggcgttgacccagcacgtgcatgtggatgtggtgcacggtctgcccgccaaggtcgttgcagttcatcaccacacggaagccttcctcgcagccctgctcccgggccaggcgctgggcggtgaagaggatatggcctgccagcggccggtctgcctcggtcaggtgctcgagggtgggaatgtgccttttcgggatgaccaggaagtgcaccggcgcctgcgggccgatatcgtgaaacgcgacaacttcctcgtcttcgtagaacttgcgcgcgggaacttcccccgccacgatcttgcagaacagacagtccatgggcgattcctccggcctcgggtgctttcccgagtgtagcggtgcccgtcgcgaccgcccaagcgtgaaggagccgcagtgaagaacgacatacacgacctcggcctggtcctggattcccgggtcaagctgatcctgatcgagtcctgggacgagccgaaggtgatggaaaccctcaccggcctggcggtcaggcgcggccttggcctgtatgcctggtcggtgaccgagggcgtgcagcgcctgggcttcggcggcgagccgctgggcggggaggagagccgcgacccggtcgcggcgttgcgcttgatcaagcacgatcagcaggcgaatctctacgtgctctgcgacctgcatcctttccttggcgacagcccgaccctggtgcgcctgctcaaggaaatcgccatggccgaaggcaatcatcgaccgaccgtggtgctggtgtcccatgcgctgaagctgccggccgaagtgcagcgcttcgccgcgcggttctcgctgtccctgcccagcgaagacgaactgctcggcatcgtccgcgaggaagcgacgcgctggagcgagcgcaaccgtggtgcccgcgtgcgcaccgacaaccgcaccctgcagcaggtggtgaagaacctgcgcgggctcagccatgccgaggcgcgactgctggcgcgcaacgtgatctgcaacgatggggcgatcacccaggaggacctgcccgagctgaaccgcaccaagttccagctactcgacctggagggcgtgctgagcttcgagtacgacaccgcgcgcttcgccgaggtcggcgggcttgccgcgctcaagcgctggctcggcgagcgtcagtcggcgttcctcgccggcacgcctggcgaccagccgaagggcatgatgctggtcggcgtgcagggcgccggcaagagcctggcggccaaggcggtggccggcctctggggcttgccgttgctgcgtctggatttcgcctgtctctacaacaagtacttcggcgaaaccgagcgcaacctgcgcgaggcgctgcgcctggccgaacagatggcgccctgcgtgctgtggatggatgaagtggagaagggcatttctggtggcgaccaggacaacggcgtcagtcagcgcgtgctgggtaccctgctgacctggatggccgagcgcgaggcgccggtcttcatggtcgccaccgcgaacgctatcgaccgcctgccgcccgaactgatccgcaagggacgcttcgacgaattgttcttcgtcgacctgccgacgccggaggttcgcgccgagatcttccgcatccacctgcaacgccgcgagctggagccggcacagttcgacctccatctgctggcggctgccagcgagggtttcagcggggcggagatcgagcaggcggtggtggcggcactgtacgccgggcaggcgcgacagcaggcggtggatcaggatctgttgctcagggaactggcgcgaacctcgccgctgtcggtgctgatggcggaaaagctcgccgcgctgcggacctgggccaaggggcgggcggtaccggcagactgagccaacggcgaaccttgccgccctgcgaggagaggccggtcaaccccgtggggcggagggtaccgccgaggcgttgatccgcgcggcgagtcggcgcaccagccagcgtggcgccaggcgtgggctcagcgccagcaggcgattgcgccaaccggggacgatcagggcgcggttcttgtccagcccgcgcagggccagcagcgcgacttcctccggggtcatcatcagcttgctccggtcgagcctgccgagccgcatcccggcttcccggaagaatgccgtgcgggttggcccagggcacagcaccgagaccttgacgccgcgctctttcagttcttcccgcaagccttccgagaagtgcaggacgtaggccttgctggcgtagtagttgctcatccaggcgccgggctggaaggcggccaccgaggcgatattgagtatctggcccccgccctgtgccgccatgcgggcgccgagggagtggcaaaggcgggccagggccaggatgttgagttcgatcagctcctgttcccgcgcccattcctggtcgatgaaggggccggaggtaccgatcccggcattgttaaccagcaggtcgatctgtcgttcgccctgttccagttcgtgcaacaaccctgacagttgcagcggctcggaaagatcgcaggtgcggaacagcacttccacgccgaaacgctgcgccagctcataggcgatgctctccagcgcgtcgcgctggcgcgccaccaggatcagggcgcgaccgcgccgggccagggcttcggctagggccaggccgataccgctggaagcgccggtgatcagggcataacggggcattcgagacttctccgaaacggacggggaattggaccccgcccgtcgcgaggggttgcgtggctactgttggtcgtcgtcttccatggcctctgccgccgccgtggcggcttcatcggcttcggccgccgctgcggcggcctgctcgtcggtggtgtacgggtcggctggagcgctggcgccgccgtcatagttcgctcgctccaggtaaccctggtaggacggcagggcgatggcggcgatgataccgactatcggcagcaggatgatcagactggccaggactttcaccccggtgctgttcgccggcggcggcggaccgtagcggttggcgccggtgctgccgggcaggaccagcatcaggatgccgaacacgctgccgacgaaggggacgaagttgagcagccagagccagcccgaccagccgaggtcatgcaggcgctgcacgccgatcatcacggcgatgacgatgaaggcgatcgaggccagggcggtgacggccacgccgacggtttcgccgagcaggaagcccaggcccatgatgaccaggaagcacagcgtcatcgccatcgaccagccgagatagcgcaggcgtccgatccggccgttggtggtgaacacgttcagctcgccgaactcggggagggcgtcgccgacctgggcgctgggcggtgtgtagggagacgcgcccgcagccgcggtggtcgcaggcgcggcgttttcgccgagctgcgcctggcgtgccaggtacttctcgatgatgacgccgcaggccgaacattccgctccgctgggctgttcatggccgcatttcgggcaggtcatgggaggcaggtcttgcgccggggtttcctccgcgacctgggggttgtgatcgggcgtttccaccaggctcaggctggccgccaggtcgacttccttgtaggcattggcgccggcctggcgcaaggcggtcaggtaacgctccgcctcggcctctggaagttcgcgtttcagcaccaccgggcgaccgccgaagagggcgtcgatcttgcccggttcgctcttgaacaggcgggcgagattgtccttcacggtttcgagcgatgcgtcgggcatcagctcgccggagaagacgatcttgaagcgttggtcggtcatgcaggcatccttgtcagctggggtgagagaaatgcagccgacagcctaatcggcggccttggcgcccacaagcgcgagatgagaactcccgcacaagccggggcgccgtgacccggcggtttcagcgcggccagcggttggccaggcgatccatgttccgcagggcggcgcgatattcccggtcgaggcgggcgaccaactcgtcgacgccgggcaagtcgtctatgttgcccgcgccctggccggcggaccacacggtcttccaggccttggcctcgtcgttcaccggcttgagtttctcgccgtagttcatgtctgccttgtcggtcaggcgcttcagatcgtaaccggcggcctccaggctttgccgcatgaagctggccggtacgccggacaccgccggggtgtgcacgatgtcggcggcgcgtgcctccaggatcatctgcttgtaggcgtcggaggcattgctctcgcgggtggcgatgaagcgagtgccgagataggccaggtcggcgccgagcatctgtgcggcgagaatctcgtggccgtggttgatgcagccggccaacagcagggtcttgtcgaagaactggcggatttccgcgaccagcgcgaaagggctccaggtcccggcgtgcccgcccgcgccggccgctaccgcgatcaggccgtcaaccccggcctcggcggctttttcggcgtggcggcgggtggtgacgtcgtggaacaccaggccgccgtagctatgcacagcgtctaccacttcgcgcactgcgccgaggctggtgatgacgatcggtacgcggtgctcgacgcagatccgcaggtcggcctgcaaccgcggattggtgttgtggacgatcaggttcaccgcatagggcgcgggattgtccagcgcctgcaggccggccccgatttcctccagccatccctcgaagccgctgctctcgcgctggttgagcgccgggaagctgccgacgatgccgctgcggcagcaggccagcactaactgcgggttggataccaggaacatcggcgcggccaccatcggcagtcgcaggcgttggtcgagcagggcgggcaaggacatggacaggactcctgggtcagaaaggtttgagcaccaccagtaggacgatcagcagcaggaacagtacaggcacttcgttgaaccagcggtagaacacatggctgcgccccggctcgccgcgggcgaagcgcttgagcatggcgccgcaggcgtggtggtagccgatcagcaggaccaccagggtcagcttggcgtgcagccagccttggctcagccagccgggggtgagatagagcatccagaggccaaggaccagggtggcgagcatcgagggcatcatgatccctcggtagagcttgcgctccatgacgcagaagcgttcccggctggtctggtcctcgctcatggcgtggtagacgaaaaggcgcggcaggtagaacaggccggcgaaccagcagaccacggcgatgatatggaaggctttgagccacaggtacatcaggacatcctcttgatcacggtgccccgatagtagagggatggctggaacgcgtcaccctggcggcttgccgctgtctgatttgccggcagatatggccgcataacaggtaggaacattcggatagggcctcgcagcaatttctgcccgacgaccccgggggctagactgccgaccgaagggccgaaccggtcgcaaagccggacgcccagcgctgttcatgccggcgctcggctcttatcattggcctcttttggctagcttgcctcagcgcgcggagtgatggacagatgatcaaggtcggcatcgttggcggtacgggttatacgggcgtggaactgctgcgcctgctggcgcagcatccgcaggcccgggtggaagtgatcacttcacgttccgaggcgggggtgaaggtcgccgacatgtacccgaacctgcgaggtcattatgatgacctgcagttcagcgtgccggacgcgcagcgcctcggcgcctgcgacgtggtgttcttcgccacgccgcacggcgtggcgcacgcgctggctggcgaactgctggacgcggggacccgggtcatcgatctgtccgctgacttccgcctggcggacgccgaggagtgggcgcgctggtacggacagccgcatggcgctccggcgctgctcgacgaggctgtctacggcctgccggaagtgaaccgcgagaagatccgccaagcccgcctgatcgccgtgccgggttgctacccgaccgcgacccagctgggcctgatcccgctgctggaggccggcctggccgacgcctcgcggctgatcgccgattgcaagtccggggtcagcggcgccggtcggggcgccaaggttggctcgctgttctgcgaggcgggcgaaagcatgatggcctacgcggtcaaagggcatcggcatctcccggaaatcagccagggcctgcgtcgggcctccggcggcgaggtcgggttgacgttcgtaccgcacctgacgccaatgatccgcggtatccatgcaaccctttatgcccatgtcgcggatcgctcggtcgacctccaggcgttgttcgagaagcgctacgccgacgaacccttcgtcgacgtgatgccggccggcagccatccggagacccgcagcgtgcgtggcgccaatgtctgccgaatcgccgtgcatcgcccccagggcggcgacctggtggtggtgctgtcggtgatcgacaacctggtcaagggcgcctcgggtcaggcgctccagaacatgaacatcctgttcgggctggacgagcgcctgggcctctcgcatgcggccctgctcccctgatgtccggctgggaactccagttccgtgatccacggcgggcctggctggtccgcctcggggtgggtgcgctgctgctggcggttccgctggcgtttctcggcggtcgctggtcgaccggggcggacgccgctcgcagcgaggccgatgcgcaacgccaggaaaccctgatcggcgagcagaaggccgagctggagcgcctgcgtaccgaaatcgaggtgttgcgcagcggagaacgtctcagccagcaggccaccgaacagagccggcagaccatcaagctgcttgaggaccaggtgttcaagcagcaacaggacatcgcgttctacaagggggtcgtcgcgccggccagcaaggcggatgcgctggaaatccgtgcctttgaggtgcagggcacggacgacccgcagcgcttccgctataaggtgatgctcagccgcctgggcagggacgaccgcaagctggatgggcggctgaaagtccgcatcagcggcaagctggcgcgcaaggacgctacctacgacctcgaacagctctcgccggaactgggcaagacagggctgtcgatttccctccggcatttccagtcgatcccagaaggggggcgtttcgccgagctggagctgccgaagaacttcatcccgaagctgatcgacgtacgtgcggagctgaatggccagtccaaaccgctacagcgccgtttcgattggccgaagcagtgagtgagcattatgtggagcaagaacaaaggccgggccgacgtccagcgtttcaccgggcagaccagcctgatcgccagcggcgccgaactggtcggtgacatgaacctcaagggcgcggtgcagatcgacggcaccgtccgcggagcgttgcaggcgcacgaagggctggtgcgggtcagcgccggcggtcgagtcgatggcgaaatccgggccccccatgtgatcatcgacggtcaggtggatggcgacatccatgccatcgaacgcctggagctgggggcccaggcccgggtgaagggcaatcttcactatgggctgatcgaaaccgccatgggggcccagatcgagggccgcctgtgcccgatgaccgaggccagtccgcgcccgctggaactgcctgccagcgtggaaactgtggattagttgaccatttttctgggacaagaggataatgggcgtaatgttgtaacgcacggcctcaagccgggagattcggaaacatgagcatcgagaccttcacccctacgcccctgctctttaccccaggcgcagccaacaaggtgaagacgttgattgacgaagagggcaatcctcgcctgaaactgcgtgtattcgtcaccggcggcggttgctcgggcttccagtatggcttcaccttcgacgaagatatcgccgatgacgataccgtgatcgagcgcgatggcgtgggcctggtggtggacccgatgagcttccagtacctggcgggctcggaagtcgactaccaggaaggcctggaaggttcgaggttcgtcatcaagaacccgaacgccgccacgacttgcggttgcggacagtcgttctcgatctgacgtcgatggggccgctacgaaaacgccgcgcttatatgcgcggcgttttcgtttcaggcgggatacagcgcgcccagagttctgggaccgagcgcaccggtcacatcagggcagttgccgggcaggcgctcgagaaaccgatgggctagccaggcgaatgccatgccctccatccaggcagggggaatgccgtattcgtcggtactggcgacccgagcttcgggcatcagcagggccaggcgcttcatcagcgccgtattgaaggcgccgccgccgcataccagcacctcttcgcagtccggctgggcgtccagcagcgattcgctgatgctgcgcgcgctcagttccagcagggttgcctggatatccgctgccggcaaggcagggtgacgagccaggtgctcctgcagccaggacaggttgaagcgctcgcgcccggtgctcttggggccacgcgcggcgaagaactcatccgccagcaggcttgccagcagtgcgtggttcatctggccgctggcggcccacgcaccgtcccggtcgaaatgttcgccgcgttggtgatgaatccaggcgtccatcagcacgttgcccgggccgcagtcgaagccgcgtaccggctttccggggctgagcagcgaaacgttgctgaagccaccgatgttcaggaccgccctggaggcgtcatcatcgccaaacagcgcctgatggaaggccggtaccagcggggcgccctggccgccggctgcgacgtcgcggcggcggaagtcggcgacgacatcgatgccggtcagctccgccagcagggcggggttgccgatctgcaccgtgaagtggcgagcgggttcatgtcggatggtttgaccgtgactgccgatggcacggacttcgtcggggctcatctgctgctggagcagcagttcgcgcacgccctgtgctgcaagggcgacccagcgttgctcgacttcggcggcgcgggcgatttcatcgggaccggggacgcacagggcgaggatgtcttcgcgcagcccggccggcatgggtaggtaatgggaagcgagcaaggtggtgcgatcaccttgctcgatcaggacgatgtccatgccgtccaggctggttccggacatcaaccccaggtagcgcggcacgatcagcgctgcttgttcagggccaggagggttttcttctcctgatccatgcgcgcgatcatcggctgggtctgcgccatgaagcgcttgcgatctgcgccaccgagcgggtccgccatgggcagcttggcactcagcggatcgacgtgacggccattgatctggaactcgtagtgcaggtgcgggccggtggccaggcccgtcatgcctacgtaaccgatgatctggccctgcttcacgctggtaccggcgcggatacccttggcgaagcggctcatgtgtccgtagatggtccgatagcggtggccgtgctggatcaccacggcgttgccgtagccccccttgcgtccggcttcgaggatcttgccgtctccggtggccttgatcggtgtgccgatgggggcagcgtagtcgacgcccttgtgcgcgcggatcttgttcaggatcgggtggcggcggcccagggagaagcgcgagctgatgcgggcgaaatccaccggcgtacggatgaatgccttgcgcatgctggagccgtcggcgcggtagtagctggtattgccctgcttgttggtatagcgcacggcggtgtaggtcttgccacggttgacgaagcgggcggcgaggatattgccggtcgccacttgcttgccgttgaccttgtgttgttcgtagatcacgtcgaactcgtcgccttcacgcagatcgagggcgaagtcgatgtcgtagccgaagatattcgacagcgacgtgaccaggttatagggcaggccggcgttacgaccggcaacgaacagcgagctggtgatacggccatgggcataggcggtatgcaggtctatctgggccttctcgcgtttgaaggagtagcccttgtcggtcttgtccaggccgatggtctcgagttcgctctgcttgactcgcagcgcctgcagctctcctttggggtcgagcttgagcttgacctcctggccgaccttcagatgggtgaagcgcttggcatccttgctgctggtcagcatgtcgtgcatggccgaggtggaaaggcctgccttggtgaatacggtcgacagcgtatcgccactggcgacggtgatggtcttccactcgggatcgacgggcttggtgtcggcatcggctacagatgtgcccggtttgtccgagtcttgctcggcggtgttgtcgtcggaggcgccttctacctgagcgaaaggcgtgccttcgtcgctggaattggtgaccgattgcggcaggaggtcgtctttctcctgaaggaggcgatcggtgttgctttcaagctccagattgagcgtggtcctcttggcctcgacttcgctcgaggggaacaccagtagtgccaaactgaggagcgctgcaacaccgctggcggccaacaagtggcttttcgggtaatacggcggcgctttctgatcggattgcgtcatggcgtgattggtgtttttggattgtgaataaataactgcctaaaatataaccaaaatctccttgaatcaagccaaaagtcgcgtctggcctggctccgtccccctgacggtcggcaaaatttgtttttagtctgcgatcttgtatggttggttccctttcgattttggcaattgggcagaacctgtaaatgaagtcggttgaagagcagctggcgctgatccagcgcggtgcagacgagatcctggtagaggcggaactggtggccaagctgaagcgtggccagcccttgcggatcaaggccggcttcgacccgaccgctcccgatctgcatcttggccataccgtgcttattaataagctgcgccagttccaggacctggggcatcaggtgatcttcctcatcggcgacttcactgggatgattggtgaccccagtgggaaaagtgttacccgtcctcccctgacgcgcgagcaggttctggagaatgcggagacgtacaagtcccaggtcttcaagatcctcgacccggccaagaccgaagtagccttcaattccacctggatggaccaactgaccccggctgacttcattcgtcttgcctctcagtacaccgttgcgcggatgctggagcgtgatgactttagcaagcgctatgccagcaatcagcccatcgctatccatgagttcctctatccgctggtccagggctatgactccgtcgcgctgaaggcggacgtcgagttgggtggcaccgaccagaagttcaacctgctgatggggcgcgagctgcagcgtgcctatggccaggaggcccaggtgatcctgaccatgccgttgctggaagggctggatggcgtgaagaagatgtccaagtcgctgggcaactatattggtatccaggaagcgccgggtgtcatgtacagcaagctggtctccattcctgacacgctgatgtggcgctacttcgaactgctcagcttccgttccctggatgagatcgatagcttccgcaaggacgtcgaggcgggcgccaacccgcgcgacatcaagatcaagctggccgaggagatcgtcgcccgcttccatggcgaggaggcggcggcgagcgcacacaagtcggccggcaatcgcctgaaggatggcgagctgccggaagacctgccggagatcgagctgtcgtcccccgaggatatgcccgttgcctctgtccttaataaggcggggttggtgaagaatgcggctgcggctcgcgatctcctgggtgccggcagcgtcaaggtggatgggcaggtcgtcgaccgcaccttcatgctggcgctgggtgagacccgtgtgttccaggcagggaagaaggctttcgcgcgcatcacgctgaaggctgaataattctttcaaataagtgttgacgccagtttctatctccctataatgcgcaccactcccggcgacgacgaagagtaaatgcttgaaaatcaagggtttacggattctctcccaggggtggtgaagcgctccggcaggttgttcaccgcagcggttcagccccgaaaggggctcgaaacgaagcttcatcgaggtgcttgacagcgaatttgaacgctgtagaatgcgcctcccgctgatcggaagatggtttgaaggtcggcgcaagcggttgagtagaaaagaaattttcgaaaataacgcttgacggaacgagaggttgctgtagaatgcgcggcctcggttgagacgaaagccttgaccaactgctctttaacaagtcgaatcaagcaattcgtgtgggtgcttgtgatgtaagactggtgatcgcaagattatcagcaacgcaagtaacactcgtgaattcgagagttttatctctttttaagagaatgcgattgctgagccaagtttagggttttctcaaaacccaagcagtattgaactgaagagtttgatcatggctcagattgaacgctggcggcaggcctaacacatgcaagtcgagcggatgaagggagcttgctcctggattcagcggcggacgggtgagtaatgcctaggaatctgcctggtagtgggggataacgtccggaaacgggcgctaataccgcatacgtcctgagggagaaagtgggggatcttcggacctcacgctatcagatgagcctaggtcggattagctagttggtggggtaaaggcctaccaaggcgacgatccgtaactggtctgagaggatgatcagtcacactggaactgagacacggtccagactcctacgggaggcagcagtggggaatattggacaatgggcgaaagcctgatccagccatgccgcgtgtgtgaagaaggtcttcggattgtaaagcactttaagttgggaggaagggcagtaagttaataccttgctgttttgacgttaccaacagaataagcaccggctaacttcgtgccagcagccgcggtaatacgaagggtgcaagcgttaatcggaattactgggcgtaaagcgcgcgtaggtggttcagcaagttggatgtgaaatccccgggctcaacctgggaactgcatccaaaactactgagctagagtacggtagagggtggtggaatttcctgtgtagcggtgaaatgcgtagatataggaaggaacaccagtggcgaaggcgaccacctggactgatactgacactgaggtgcgaaagcgtggggagcaaacaggattagataccctggtagtccacgccgtaaacgatgtcgactagccgttgggatccttgagatcttagtggcgcagctaacgcgataagtcgaccgcctggggagtacggccgcaaggttaaaactcaaatgaattgacgggggcccgcacaagcggtggagcatgtggtttaattcgaagcaacgcgaagaaccttacctggccttgacatgctgagaactttccagagatggattggtgccttcgggaactcagacacaggtgctgcatggctgtcgtcagctcgtgtcgtgagatgttgggttaagtcccgtaacgagcgcaacccttgtccttagttaccagcacctcgggtgggcactctaaggagactgccggtgacaaaccggaggaaggtggggatgacgtcaagtcatcatggcccttacggccagggctacacacgtgctacaatggtcggtacaaagggttgccaagccgcgaggtggagctaatcccataaaaccgatcgtagtccggatcgcagtctgcaactcgactgcgtgaagtcggaatcgctagtaatcgtgaatcagaatgtcacggtgaatacgttcccgggccttgtacacaccgcccgtcacaccatgggagtgggttgctccagaagtagctagtctaaccgcaagggggacggttaccacggagtgattcatgactggggtgaagtcgtaacaaggtagccgtaggggaacctgcggctggatcacctccttaatcgaagatctcagcttcttcataagctcccacacgaattgcttgattcactggttagacgattgggtctgtagctcagttggttagagcgcacccctgataagggtgaggtcggcagttcgaatctgcccagacccaccaattgttggtgtgctgcgtgatccgatacggggccatagctcagctgggagagcgcctgctttgcacgcaggaggtcaggagttcgatcctccttggctccaccatctaaaacaatcgtcgaaagctcagaaatgaatgttcgtgaatgaacattgatttctggtctttgcaccagaactgttctttaaaaattcgggtatgtgatagaagtaagactgaatgatctctttcactggtgatcattcaagtcaaggtaaaatttgcgagttcaagcgcgaattttcggcgaatgtcgtcttcacagtataaccagattgcttggggttatatggtcaagtgaagaagcgcatacggtggatgccttggcagtcagaggcgatgaaagacgtggtagcctgcgaaaagcttcggggagtcggcaaacagactttgatccggagatctctgaatgggggaacccacctaggataacctaggtatcttgtactgaatccataggtgcaagaggcgaaccaggggaactgaaacatctaagtaccctgaggaaaagaaatcaaccgagattcccttagtagtggcgagcgaacggggattagcccttaagcttcattgattttagcggaacgctctggaaagtgcggccatagtgggtgatagccccgtacgcgaaaggatctttgaagtgaaatcgagtaggacggagcacgagaaactttgtctgaacatggggggaccatcctccaaggctaaatactactgactgaccgatagtgaaccagtaccgtgagggaaaggcgaaaagaaccccggagaggggagtgaaatagaacctgaaaccgtatgcgtacaagcagtgggagcctacttgttaggtgactgcgtaccttttgtataatgggtcagcgacttatattcagtggcaagcttaaccgtatagggtaggcgtagcgaaagcgagtcttaatagggcgtttagtcgctgggtatagacccgaaaccgggcgatctatccatgagcaggttgaaggttaggtaacactgactggaggaccgaacccactcccgttgaaaaggtaggggatgacttgtggatcggagtgaaaggctaatcaagctcggagatagctggttctcctcgaaagctatttaggtagcgcctcatgtatcactctggggggtagagcactgtttcggctagggggtcatcccgacttaccaaaccgatgcaaactccgaatacccagaagtgccgagcatgggagacacacggcgggtgctaacgtccgtcgtgaaaagggaaacaacccagaccgccagctaaggtcccaaagttgtggttaagtggtaaacgatgtgggaaggcttagacagctaggaggttggcttagaagcagccatcctttaaagaaagcgtaatagctcactagtcgagtcggcctgcgcggaagatgtaacggggctcaaaccacacaccgaagctgcgggtgtcacgtaagtgacgcggtagaggagcgttctgtaagcctgtgaaggtgagttgagaagcttgctggaggtatcagaagtgcgaatgctgacatgagtaacgacaatgggtgtgaaaaacacccacgccgaaagaccaagggttcctgcgcaacgttaatcgacgcagggttagtcggttcctaaggcgaggctgaaaagcgtagtcgatgggaaacaggttaatattcctgtacttctggttactgcgatggagggacggagaaggctaggccagcttggcgttggttgtccaagtttaaggtggtaggctgaaatcttaggtaaatccggggtttcaaggccgagagctgatgacgagtcgtcttttagatgacgaagtggttgatgccatgcttccaagaaaagcttctaagcttcaggtaaccaggaaccgtaccccaaaccgacacaggtggtcgggtagagaataccaaggcgcttgagagaactcgggtgaaggaactaggcaaaatggcaccgtaacttcgggagaaggtgcgccggctagggtgaaggatttactccgtaagctctggctggtcgaagataccaggccgctgcgactgtttattaaaaacacagcactctgcaaacacgaaagtggacgtatagggtgtgacgcctgcccggtgccggaaggttaattgatggggttagcgcaagcgaagctcttgatcgaagccccggtaaacggcggccgtaactataacggtcctaaggtagcgaaattccttgtcgggtaagttccgacctgcacgaatggcgtaacgatggcggcgctgtctccacccgagactcagtgaaattgaaatcgctgtgaagatgcagtgtatccgcggctagacggaaagaccccgtgaacctttactgtagctttgcactggactttgagcctgcttgtgtaggataggtgggaggctttgaagcgtggacgccagttcgcgtggagccatccttgaaataccaccctggcatgcttgaggttctaactctggtccgtaatccggatcgaggacagtgtatggtgggcagtttgactggggcggtctcctcctaaagagtaacggaggagtacgaaggtgcgctcagaccggtcggaaatcggtcgcagagtataaaggcaaaagcgcgcttgactgcgagacagacacgtcgagcaggtacgaaagtaggtcttagtgatccggtggttctgtatggaagggccatcgctcaacggataaaaggtactccggggataacaggctgataccgcccaagagttcatatcgacggcggtgtttggcacctcgatgtcggctcatcacatcctggggctgaagccggtcccaagggtatggctgttcgccatttaaagtggtacgcgagctgggtttagaacgtcgtgagacagttcggtccctatctgccgtggacgtttgagatttgagaggggctgctcctagtacgagaggaccggagtggacgaacctctggtgttccggttgtcacgccagtggcattgccgggtagctatgttcggaaaagataaccgctgaaagcatctaagcgggaaacttgcctcaagatgagatctcactgggaacttgattcccctgaagggccgtcgaagactacgacgttgataggctgggtgtgtaagcgttgtgaggcgttgagctaaccagtactaattgcccgtgaggcttgaccatataacacccaaacaatctgatgattgtgtgttgtaaggtgaagtcgacgaaccgaaagttcgcatgaaccgcaaaacaccttgaaatcacatacctgaatccggatagacgtaagcccaagcgaacggatatctaaccgaattgcttgacgatcatagagcgttggaaccacctgatcccttcccgaactcagaagtgaaacgacgcatcgccgatggtagtgtggggtctccccatgtgagagtaggtcatcgtcaagctcctatcccaaaacccctggtcagcgatgaccgggggttttgcttttgcgcgcggaaaagtctgcgaaaatccggggaaaaggcagctctacggcagggcttttcgtaggcaaagcgcaagtgcctctatatgatgcgtgcctggctagtgtggggcgtctatgcagaccttgctgaaactacttcaagacgggcgattccactccggtgaggagttgggggcagtactgggcatcagtcgcagtgcagtctggaaacgcttgcagcacctggaggctgaacatggcctgcagttccacaaggtgcgtggccggggttaccgcctggcgagtcccctcagtctcctggatccgcggaagatcgacagcctctggccggtcgagatcatgcccaccgtcgattcgaccaatagcgaggccatgcgcaggctcgcggctggagcctcgacgcctttcgttatcgtcgccgagcagcagactgccgggcgtggacgtcgcggccgagcctgggtcagtccctatggagagaacctctattattctctggccattactgtcagggggggcgctcgggagctcgaagggttgagcctggttgtcggtctcgcggtgctccgggccctggagtccttgggcgtccgggacgccgggttgaagtggccgaacgaccttctgcagggaggcaagaagatcgccggaattctcctggagctgagtggcgaccccgcggatctgtgtcatgtcgttatcggcatagggatcaacgtcaacatgaagaccgccactgatatcggccagccttggacctccctgcgcgaagcgctgggggagctggtggatcgttcgcggctgctttctgctctcaatcggcagttggccgattatctcgataggcattcgcgcgaaggctttgctgcaagtcgcgaggagtgggagtcctgcaatctctggcagggtgcccaggtcattctctcgactgctctgagttccatcgagggtcgtgtgctgggtgtcgatagccgaggagcgctgcgcctcgaggtggatggcgtggagcaggggttcagtggaggggagcttagtttgaggttgcgtcaatgattcttgagctcgactgtggaaactcgctgatcaagtggcgggtcatcgagggggcggcgcggtcggtcgccggtggccttgcggagtccgatgatgccctggtcgaacagttaacgtcgcagcaagcgctgccagtgcgagcctgtcgcctggtgagcgttcgcagcgagcaggaaacctcgcaactggtcgcacggttggagcagctgttcccggtttcggcgctggttgcatcatccggcaagcagttggcgggtgtgcgcaacggctatctcgattaccagcgcctggggctcgaccgctggctggccctcgtcgcggctcatcatctggctaagaaggcctgcctggtcatcgatctggggaccgcggtcacctctgacctggtcgcggcggatggagtgcatctggggggctacatatgcccgggcatgaccctgatgagaagccagttgcgcacccatacccgacgtattcgctacgacgatgcagaggcccggcgggcgcttgccagtcttcagccagggcaggccacggccgaggcggttgagcggggttgtctgctcatgctcagggggttcgttcgtgagcagtacgccatggcgtgcgagctgctcggtccggattgtgaaatattcctgacgggtggggatgccgaactggttcgcgacgaactggctggcgcccggatcatgccggacctggttttcgtagggctggcactggcttgcccgattgagtgagaggatctatgcgctggttcttcctgtttctccttgccctgaacgtcttctactacgtctggcaccagcagcaatccccgctacgggccaaggaaatcgcaccgctggaactctataaggatgggcagaagaacattctgctgttggccgagagcaaccttgcttccagggcgcgctcggggtcgcaggtgccggcgccgagtgtgcctccggctgccgaagagtcgatcgcatccgagtcgacctgtctctatcttggcggaggcggtgaggaggtggatgcccgaaggttgcagcagcgcctgctgggcctggatatcgaggcggaggtcgaggcccgcggggagatgagcgtcgattactgggtctatcttcctccgctagcctcgcgggaggctgcgcttcgtcagttgaaggagcttcaggcgcgcaatatcgacagctacctgattggcgagggagtgctggccaatggcatttctttggggatgttttccgcgcgggattcggctgaaagtgcgcaggcccgtctcaagacggcaggttacgacgcggagctgaaggaattgccccgcgggcagcgtgatttctgggtaagggtggcacccggcagccggcgtctggtggatgagcaactgctccaggagctggctcgggacttcaagggattgcagcatcaaataatgtcgtgcaaaggtgttgcatccccctgatggtttgcatagaatggcgcccgcttcgcagggggaaggctgaaagactcctaccatgaagttgctgttgaaacctaagttcaggttttttaagagaaaactcttgacagcaaggtggcagacgtagagaatgccgcccaccagtttggagggattcccgagtggccaaagggatcagactgtaaatctgacgtcatagacttcgaaggttcgaatccttctccctccaccagtttaaaagcgtgagcttcgggctccgcgggtatagttcagtggtagaacctcagccttccaagctgatgatgcgggttcgattcccgctacccgctccagtcaagttgcttgtgtttcgctcatgtagctcagttggtagagcacacccttggtaagggtgaggtcagcggttcaaatccgctcatgagctccatttatccaggggcagatatgaaaatatctgcccttgttctaatggtagcgtgatccgctcaattccttgaaggggatggtctccatggctaaagaaaaatttgaacggaacaagccgcacgtcaacgtcggcaccatcggtcacgttgaccatggcaagaccactctgaccgctgcactgaccaaggtctgctccgacacctggggtggttccgctcgtgctttcgatcagatcgacaacgcgccggaagaaaaggcccgcggtatcaccatcaacacctcgcacgttgaatacgattccgctgttcgtcactacgctcacgttgactgccccggtcacgccgactacgtgaagaacatgatcaccggtgctgcccagatggacggcgcgatcctggtttgctcggctgccgacggccccatgccgcagacccgcgagcacatcctgctgtcccgccaggtaggcgttccctacatcgtcgtgttcctgaacaaggccgacatggtcgacgacgccgagctgctggaactggtcgagatggaagttcgcgatctgctgaacacctacgacttcccgggcgacgacactccgatcatcatcggttccgcgctgatggcgctggaaggcaaggatgacaacggcatcggcgtaagcgccgtgcagaagctggtagagaccctggactcctacattccggagccggttcgtgccatcgaccagccgttcctgatgccgatcgaagacgtgttctcgatctccggccgcggtaccgtggtaaccggtcgtgtagagcgcggcatcatcaaggtccaggaagaagtggaaatcgtcggcatcaaggcgaccaccaagaccacctgcaccggcgttgaaatgttccgcaagctgctcgacgaaggtcgtgctggtgagaacgttggtatcctgctgcgtggcaccaagcgtgaagacgtagagcgtggccaggtactggccaagccgggcaccatcaagccgcacaccaagttcgagtgcgaagtgtacgtgctgtccaaggaagaaggtggtcgtcacaccccgttcttcaagggctaccgtccgcagttctacttccgtaccactgacgtgaccggtaactgcgagctgccggaaggcgtagagatggtaatgccgggcgacaacatcaagatggttgtcaccctgatcgctccgatcgccatggaagatggcctgcgcttcgcgatccgcgaaggcggccgtaccgttggcgccggcgtggttgccaagatcatcgaataatatcggttgatcttcccctctcaggccggcataatggtcggcctgattttgcttcaggccagtagctcaattggcagagcggcggtctccaaaaccgcaggttgggggttcgattccctcctggcctgccagatttcccaagtaaatctggcttttcttcacgagattcctaacagatgaatgccaaggcagaagccaaagaatcacgttttgatctcttgaaatggctcttggttgccgttctggttgtggttgccgttgtgggcaatcagtacttttcggctcaaccaatcctgtatcgcgttctcggtattctcgttctggcggtgatcgctgccttcctggctctgcaaacggccaaggggcaggccttctttagtcttgctaaggaagcgcgcgtcgagattcgcaaggtcgtatggccgagtcgtcaagaaacaactcagaccacgctgatcgtggtcgcggtagtgctggtaatggcgctgctgctgtgggggctcgattccctgctgggttggttggtttccatgattgtaggttaagggtgcgccgtggctaagcgttggtacgttgtgcatgcatactcgggctacgagaagcatgtcatgcgctcgctgatcgagcgtgtcaagcttgctggcatggaagaagagttcggcgagattctggttcccaccgaagaagtggtggagatgcggaacggccagaagcgcaagagcgagcgcaaattcttccctggctatgtgctggttcagatggaaatgaacgaaggtacctggcacctggtgaaggataccccgcgtgtcatgggcttcatcggcgggactgccgacaagccggctccgatcaccgatcgtgaggctgatgcaatcctgcgtcgcgtggccgatagcggcgacaagcccaagccgaagaccctgttcgagccgggcgagaccgttcgtgtcatcgatggtcctttcgccgacttcaatggtgtcgtcgaagaagttaactacgagaagagccggatccaagtggccgtgctcatctttggccgctctaccccggtggagctggagttcagtcaggtcgaaaaggtctagctgaaaacgcatccctcaccccgcagcccaaggctgcggggttttgtcgtcactgggataaacgcgaaagcaaccggggagccttcaggcgcttgtacccgaatttggagtagcaaatggctaagaaaatccaggcttatatcaagctgcaagtaaaggccggtcaggccaacccgtcgccgccggtcggccctgccctgggtcagcacggcgtgaacatcatggaattctgcaaggcgttcaacgccaagacccaaggccaagagccgggcctgccgactcctgtgatcatcaccgtttacagcgaccgtagcttcaccttcgaaaccaagagcaccccggctgccgtcctgctgaaaaaagcagctggcatcaccagcggctccgctcgtccgaactcccagaaagtcggcaccgttacccgtgcccagctggaagagatcgccaagaccaagcaggctgacctgaccgctgctgatctggacgctgctgtacgtaccatcgctggctccgcgcgcagcatgggcctgaacgtggagggtgtgtaatggctaagctgaccaagcgccagaaggcgattgccgagaaagtagttgccggcaagcagtacagcttcgaagaggccgccaagctgctggccgagctgtccaccatcaagttcaaggagtccgtggacgttgccgtgaacctcggcgtcgatccgcgtaaatccgaccaagtcgttcgtggcgccaccgtcctgccgaacggcaccggcaagagcgtccgcgttgccgtcttcacccaggggccggctgccgaagccgctctggctgccggcgccgacaaggtgggcatggacgagctggctgccgaaatgaaaggtggcgacctgaactacgacgtcgtcatcgcttccccggatgccatgcgtgtcgtcggccagctgggccagatcctcggtccgcgtggtctgatgccgaacccgaaagtcggcaccgtgactccggacgtcgctaccgccgtgaagaatgccaaggctggtcaggtacgtttccgtaccgacaagaacggcatcatccacagctccgtcggtaaggtcgatttcgagccggccaagctgcagcagaacgtcgaagcgctgctggccgacctgaagcgcctgaagccgtcctcgtcgaaaggcgtgtacgtcaagcgcgtgaccctgagcaccaccatgggtccgggcctgcagatcgacctggcttccctggaagcctaagtgaaatcgtgcagcgggttctgcccgctgcacaggtattggggtccctgcctggcgggggctatccaagaccgtaggtggcgcaagccttaaaccacaagcctacgcagatggtgctcccgattcggttaccgaatcagacaccaaaacgacgtccggccccggctggacgaaacggtaacatccaggagtaaacccgtggcaattaaactcgaagacaagaaggccatcgtcgctgaagtcaacgaggctgccaaagctgccctgtccgctgtcgtggccgatgcccgtggcgtgaccgtaggcgccatgaccggactccgtaaagaggcccgcgaagctggtgtgtacgtgaaagtcgtacgtaacaccctgctcaagcgcgccgttgaaggcacccagttcgacgtgctcaacgacgtgttcaaaggcccgaccctgatcgctttctccaatgaacatccgggcgctgccgctcgtatcttccgtgagttcgccaagggtcaggacaagttcgagatcaaggcggctgccttcgagggtcagttcctcgcagccaatcagatcgacgtactggcaagcctgccgacctacgacgaagccgtatcgcagctgatgagcgtgattcagggcgctaccagcaagctggctcgtactctggcggccattcgcgaccagaaagaagctgctgccgcctaagtcggctcgcaagcgctttcaatcttatttgtttaatacgatggccgcaggccgtcccccaatacaggaattagagtcatggctctgaccaacgaagacatcatcaacgccgtatccgaaatgtccgtcatgcaagtggtcgaactgatcaaggcgatggaagagaagttcggcgttaccgctgctgccgctaccgttgccgctgctggcccggctgctgccgctgccgaagagcagaccgagttcaccatcgtcctggccgaagctggcgacaagaaagtgaacgtgatcaaggtcgttcgcgaactgaccggtctgggtctgaaagaagccaaggctgtcgtagacggcgctccgggcgtggtgaaggaaggcgcttcgaaagaagaagccgaagccgccaagaaagccctggaagaagcaggcgctaaagtcgagctcaagtaagcgacgaccttgcgtctacagcccgagcgtcaagcgaaaggctgatggctggtggcttttgccaccggcctttttccgttctgggtggactcgcctcgggcgttccacccaagacgtgaaagtgccccgagtgggcaatgcaggccaaggggtctgcaagattttccggctgctcccgtcggagacgccaaacaagcaggtgaccaagctggggaacgctgatggcttactcatacactgagaaaaaacgtatccgcaaggactttagcaagttgccggacgtcatggatgtgccgtatttgctggccatccagctggattcctatcgcgaattcctgcaggctggcgcaaccaaggagcagttccgagatatcggtctgcacgcggccttcaagtccgttttcccgattatcagctattccggcaatgctgccctggaatacgtcggctaccgtctgggtgagccggcattcgatgtcaaggagtgcgtgctgcgcggcgtgaccttcgccgtaccgctgcgcgtgaaagttcgcctgatcatcttcgaccgcgagtcgtcgaacaaggcgatcaaggacatcaaggaacaagaagtctacatgggggaaatccccctgatgaccgagaacggtaccttcatcatcaacggtaccgagcgtgtcatcgtctcccagctgcaccgttccccgggcgtgttcttcgaccacgaccgtggcaagacccacagctccggcaagctgctgtactccgcgcggatcattccttaccgcggttcctggctggacttcgagttcgatccgaaggactgcgtgttcgtccgtatcgaccgtcgccgcaagctgccggcctcggtactgctgcgcgcgctcggctacagcaccgaagagatcctcaacgccttctacgcgaccaacgtcttccacatcaagggcgagaccctgaacctggaactggtcccgcagcgcctgcgcggtgaagtcgcgagcatcgacatcaaggatggcagcggcaaggtgatcgtggagcaggggcgtcgtatcactgcccgccacatcaaccagctggaaaaggctggcgtgagccagctggaagtgccgttcgactacctgatcggccgtaccatcgccaaggcgatcgtgcatccggctaccggcgagatcatcgccgagtgcaacaccgagctgaccctcgacctcctggccaaggtggccaaggcccaggtcgtgcgcatcgagaccctgtacaccaacgacatcgactgcggtccgttcatctccgacaccctgaagatcgacaacaccagcaaccagctggaagccctggtcgagatctaccggatgatgcgtccgggcgagccgccgaccaaggaagctgccgagaccctgttcggcaacctgttcttcagcgccgagcgttacgacctgtcggccgtaggccggatgaagttcaaccgccgtatcggtcgtaccgagatcgaaggtccgggcgtcctgagcaaggaagacatcatcgatgtgctcaagaccctcgtcgacatccgtaacggcaagggcatcgtcgatgacatcgaccacctgggcaaccgtcgcgtccgttgcgtcggcgaaatggccgagaaccagttccgcgtgggcctggtgcgtgtcgagcgcgcggtcaaggaacgcctgtccatggccgaaagcgaaggcctgatgccgcaggacctgatcaacgccaagccggtggctgccgcgatcaaggagttcttcggttcgagccagctgtcgcagttcatggaccagaacaacccgctttccgagatcacccacaagcgccgcgtctccgcgctcggcccgggcggtctgacccgtgagcgtgcgggcttcgaggttcgtgacgtacacccgacccactacggccgcgtgtgcccgatcgaaacccctgaaggtccgaacatcggtctgatcaactccctggcgacctacgcccgcaccaacaagtacggcttcctcgagagcccgtaccgcgtggtcaaggacagcctggtaaccgacgagatcgtgttcctgtcggcgatcgaagaagccgaccacgtcatcgcccaggcttcggcgaccctcaacgagaagggtcaactggtggacgagctggtggccgtgcgtcacctgaacgaattcaccgtgaaggcgccggaagacgtgaccctgatggacgtgtcgccgaagcaggtcgtttccgtcgctgcctcgctgattccgttcctcgagcacgatgacgccaaccgcgcactcatgggctcgaacatgcagcgtcaggccgtgccgaccctgcgtgccgacaagccgctggtgggtaccggcatggagcgcaacgtggcgcgcgactccggcgtctgcgtcgtggctcgccgtggcggtgtgatcgactcggtcgatgccagccgtgtcgtggttcgcgtggcggatgacgaggtcgagaccggcgaagcgggtgtcgacatctacaacctgaccaagtacacccgttccaaccagaacacctgcatcaaccagcgtccgctggtgagcaagggtgacgtggtcgcgcgcggcgacatcctggccgacggtccgtccaccgacatgggcgaactggccctgggccagaacatgcgcgtagcgttcatgccctggaacggcttcaacttcgaagactccatctgcctgtccgagcgcgtggtccaggaagatcgtttcaccacgatccacatccaggaactgacctgcgtcgctcgtgacaccaagctcggcccagaggaaatcaccgcggacatcccgaacgtgggcgaggccgcgctgaacaagctggacgaagccggtatcgtctacgtcggcgccgaagtgcaggccggcgacatcctggtcggcaaggtcactccgaaaggcgagacccagctgactccggaagagaagctgctgcgcgcgatcttcggtgagaaggcgtccgacgtgaaggacacctccctgcgtgtgccgaccggcaccaagggtaccgtcatcgacgttcaggtcttcacccgcgacggcgtcgagcgcgactcccgcgcgctgtccatcgagaagatgcaactcgaccagatccgcaaggacctgaacgaagagttccgcatcgtcgaaggcgcgaccttcgagcgtctgcgtgccgccctggtcggtgccaaggctgaaggtggcccggcgctgaagaagggcacggagatcaccgacgactacctcgacggtctcgagcgcggccagtggttcaagctgcgcatggccgacgacgccctgaacgaacagctggagaaggcccaggcctacatcagcgatcgtcgccagctcctggacgacaagttcgaggacaagaagcgcaagctgcagcagggcgacgacctggctccgggcgtgctgaagatcgtcaaggtctacctggcgatcaagcgtcgcatccagccgggcgacaagatggccggccgtcacggtaacaagggtgtggtctcggtgatcatgccggtggaagacatgccgcacgatgccaacggcaccccggtcgacatcgtcctcaacccgctgggcgtaccgtcgcgtatgaacgtcggtcagatcctcgaaacccacctgggcctcgcggccaaggggctgggcgagaagatcaaccgcatgctcgaagagcagcgcaaggtcgccgaactgcgtaagttcctgcacgagatctacaacgagatcggcggtcgcgaggaaaacctcgacgagctgggcgacaacgagatcctcgcgctggccaagaacctgcgcggtggcgtaccgatggcgaccccggtgttcgatggcgccaaggaacgcgagatcaaggccatgctgaagctggccgacctgccggaaagcggccagatgcgtctgttcgacggccgtaccggcaaccagttcgagcgtccgaccaccgtcggctacatgtacatgctcaagctgaaccacctggtggacgacaagatgcacgcccgttccaccggctcgtacagcctggttacccagcagccgctgggtggtaaggcacagttcggtggtcagcgcttcggtgagatggaggtgtgggcgctggaagcctatggcgcggcgtacaccctgcaggaaatgctgacggtcaagtcggacgacgtgaacggccggaccaagatgtacaagaacatcgtggacggcgatcaccgcatggaggccggcatgcccgagtccttcaacgttctgatcaaagagatccgttcgctcggcatcgacatcgaactggaaaccgaataacacgtgacgctagacggtgcggctggtcaaggccggtcgcaccgggtccgtgaggaggaaaggccttgaaagacttgcttaatctgttgaaaaaccagggtcaaatcgaagagttcgatgccatccgtattggcctggcttcgcccgagatgattcgttcctggtctttcggcgaagttaaaaagccggaaaccatcaactaccgtaccttcaagccggagcgcgacggcctgttctgcgccaagatcttcggcccggtgaaggactacgagtgcctgtgcggcaagtacaagcgcctcaagcaccgcggtgtgatctgcgagaagtgcggcgtggaagtcgccctggccaaggtgcgccgcgagcgcatgggccacatcgagctggcttcgccggttgcccacatctggttcctgaagtcgctgccgtcccgtatcggcctgctgctggacatgaccctgcgcgatatcgagcgcgtgctctatttcgagagctacgtggtgatcgatccgggcatgaccaccctggaaaagggccagctgctgaacgacgagcaatacttcgaggccctcgaagagttcggtgacgatttcgatgctcgcatgggcgccgaagccgttcacgaactgctcaacgccatcgacctggagcacgagatcggccgcctgcgcgaagagattccgcagaccaactcggaaaccaagatcaagaagctgtccaagcgcctgaagctgatggaagccttccagggctccggcaacaagcctgagtggatggtcctgaccgtcctgccggtgctgccgccggacctgcgtccgctggttccgctggatggcggtcgcttcgcgacttccgacctgaacgacctgtatcgtcgggtgatcaaccgtaacaaccgtctgaagcgcctgctcgacctggctgctccggacatcatcgtgcgcaacgaaaagcgcatgctgcaggaagccgtcgacgccctgctcgacaacggccgtcgcggtcgcgccatcaccggctcgaacaagcgtccgctgaagtcgctggccgacatgatcaagggcaagcaaggtcgcttccgtcagaacctgctcggcaagcgcgtggactactccggtcgttccgtgatcaccgtgggcccgaccctgcgcctgcaccagtgcggtctgccgaagaagatggccctggagctgttcaagccgttcatcttcggcaagctggaaggtcgtggtatggccaccaccatcaaggccgccaagaaaatggtcgagcgcgagctgcccgaggtctgggacgttctcgccgaagtcatccgcgagcatccggttctcctgaaccgtgcgccgaccctgcaccgtctgggcatccaggcgttcgagccggtcctcatcgaaggcaaggcgatccagctgcacccgctggtctgcgccgcgtacaacgccgacttcgacggtgaccagatggccgtccacgttccgctgaccctcgaggcccagctggaagcgcgcgcgctgatgatgtccaccaacaacatcctgtcgcccgccaacggcgagccgatcatcgttccgtcgcaggacgtggtaatgggtctgtactacatgacccgtgaagcgatcaacgcgaagggcgagggcatggccttcgccgacctgcaggaagtcgaccgcgcctaccgcagcggccaggcgtccctgcacgctcgcgtgaaagtgcgcatcaacgaaaagatcaagggtgaagacggccaactgaccgccaatacccgtatcgtcgacaccaccgtcggccgcgcgctgctgttccaggtcgttccggccggcctgccgttcgacgtggtcaaccagtcgatgaagaagaaggcgatctccaagctgatcaaccactgctatcgcgtggtgggtctgaaggacaccgtcatcttcgccgaccagctgatgtacaccggtttcgcctactcgaccatttccggcgtgtccatcggcgtcaacgacttcgtcatcccggacgagaaggcgcggatcatcaacgccgccaccgacgaagtgaaggagatcgagagccagtacgcctccggcctggtaacccagggcgagaagtacaacaaggtgatcgacctgtggtcgaaggccaacgacgaagtgtccaaggcgatgatggccaacctctcgaaagagaaggtcgtcgatcgcgagggcaaggaagtcgaccaggagtccttcaactccatgtacatgatggctgactcgggtgcgcggggctccgcggcccagatccgtcagctggcaggtatgcgcggcctgatggccaagccggacggctcgatcatcgagaccccgatcaccgcgaacttccgggaaggcctgaacgtactccagtacttcatctccacccacggtgctcgtaagggtctggcggataccgcgctgaagaccgcgaactccggttacctgacccgtcgtctggtcgacgtggcccaggatctggtagtgaccgagatcgattgcggtaccgagcacggcctgctgatgtcgccgcacatcgaaggcggcgacgtggtagaaccgctcggcgagcgcgtgctcggccgtgtgatcgcgcgcgacgtgttcaagccgggcagcgacgaggtcatcgtgccggccggcaccctgatcgacgagaagtgggtcgacttcctcgaagtgatgagcgtcgacgaagtggtggtgcgttccccgatcacctgcgaaacccgtcatggcatctgcgccatgtgctacggccgcgacctggcccgtggccatcgcgtcaacatcggcgaggcggtcggtgtcatcgctgcccagtccatcggtgagccgggcacccagctgaccatgcgtaccttccacatcggcggtgcggccagccggacctccgcggccgacaacgtccaggtgaagaacggcggcaccatccgcctgcacaacctgaagcatgtggttcgtgccgacggcgcgctggtcgcggtttcccgttccggcgaactggcggttgccgacgacttcggtcgcgagcgcgagcgctacaagctgccgtacggtgcggtgatctcggtcaaggaaggtgacaaggtcgacccgggcgctatcgtcgccaagtgggacccgcacacccacccgatcgtcaccgaggtggacggtaccgtggccttcgtgggcatggaagagggcatcaccgtcaagcgtcagaccgacgaactgaccggcctgaccaacatcgaagtgatggatccgaaggaccgtccggctgccggcaaggacatccgtccggccgtgaagctgatcgatgccgcgggcaaggacctgctgctgccgggtaccgacgtaccggcgcagtacttcctgccggccaacgccctggtcaacctgaccgacggcgccaaggtgagcatcggtgacgttgtcgcgcgtatcccgcaggaaacctcgaagacccgtgacatcaccggtggtctgccgcgcgttgccgacctgttcgaggctcgtcgtccgaaagagccttcgatcctggcggaaatcagcggcaccatctccttcggcaaggagaccaagggcaagcgccgcctggtcatcacgccgaacgatggcagcgatccgtacgaggagctgattccgaagtggcgtcacctgaacgtgttcgaaggcgaacaggtgaaccgcggcgaagtcatctccgacggtccgagcaacccgcacgacatcctgcgcctgctgggcgtgagctcgctggcgaagtacatcgtcaacgagatccaggacgtctaccgtctgcagggcgtgaagatcaacgacaagcacatcgagaccatcctgcgtcagatgctgcgcaaggtcgaagtcagcgagtccggcgactccagcttcatcaaaggcgaccaggtggaactcacccaggtgctggaagagaacgaacagctcggtaccgaggacaagttcccggccaagtacgagcgcgttctgctgggtatcaccaaggcttccctgtcgaccgagtcgttcatttccgcggcgtcgttccaggagaccacccgcgtcctcaccgaggcggcggtcaccggcaagcgcgacttcctgcgtggtctgaaagagaacgtggtcgtgggtcgcctgatcccggccggtaccggtctggcttaccacagcgagcgcaagcgtcagcgcgacctcggcaagccgcagcgtgtgagtgccagcgaggcggaagccgcactgaccgaagcgctgaactcgagcggtaactaagcatcaacgacaagccccggctatcccgatagccggggctttgtcttgacggtgtacaagaacctctttactattttgtaccccgaaaattggcagggcgcatgctctgtcatttcgtttgtgtgtcgtaagacaatcagtggagctatagatggcaactatcaaccagctggtgcgtaagccgcgcaagcgcatggtcgacaagagcgacgtgcctgcgctgcagaactgcccgcaacgtcgtggcgtatgcacccgcgtatacaccaccacgccgaaaaagccgaactcggcactgcgtaaggtatgccgtgtacgtctgaccaacggtttcgaggtttcctcgtacatcggtggtgaaggtcacaacctgcaagagcacagcgtagtgctgatccgtggcggtcgtgtaaaggaccttccgggtgtgcgttaccacaccgtgcgcggttcgctggacacctcgggtgtcaaagaccgtaagcagggtcgttcgaagtacggcgccaagcgtccgaagtaatagcgtttttatatttatctgagtcgataagagtaaggtcgggcgtaacttgactgttatggtcccgggctaacctgaagaccgtttgagggcttatcaatgccaagacgtcgtgtagcggccaagcgtgaagtgctggctgatccgaaatacggaagccagatcctggccaagttcatgaaccacgtgatggaaagcggcaagaaagccgttgccgagcgtatcgtttacggtgcgctggacaaggtgaaggaacgcggcaaggccgatcccctggaaaccttcgaaaaagctctcgatgccatcgctccgctggtcgaagtgaagtcccgccgcgtaggtggtgcgacttaccaggttccggtcgaagtccgtccgtcccgtcgtaatgccctggccatgcgttggctggtggacttcgcccgcaagcgtggcgagaagtccatggctctgcgcctggctggcgagctgctggatgccgctgaaggcaagggcgcagcagtcaagaagcgtgaagacgtgcaccgtatggcagaggccaacaaggccttctcgcactaccggttctaatcgcgctgcccaacccccgaggaccttattgtggcccgtactacacccatcaaccgctaccgtaatatcggtatctgtgcccacgttgacgcgggcaagaccaccaccacggagcgggttctgttctataccggcgtcaaccacaagctgggcgaagtgcatgacggcgctgcgaccaccgactggatggtgcaggagcaggagcgcggtatcaccattacctccgctgccgttaccaccttctggaagggctcgcgcggtcagtacgacaactatcgcgtaaacgtcatcgacacccccggccacgtagacttcaccatcgaggtggagcgttccctgcgtgtactggacggcgctgtcgtggtgttctgtggcacctccggcgtagagccgcagtcggaaaccgtatggcgtcaggccaacaagtacggcgtaccgcgcatcgtctacgtcaacaagatggaccgccagggcgcgaacttcctgcgcgtcgtcgagcagatcaagaagcgcctgggtcataccccggttccggtccagctcgccatcggcgctgaagagaacttcgtcggtcaggtcgacctgatcaagatgaaggccatctactggaacgatgacgacaagggcatgacctaccgcgaggaagaaattcctgcggagctcaaggacctggccgaagagtggcgttccagcatggtcgaggctgcggccgaagccaacgaagagctgatgaacaagtacctcgaagagggcgagctctccgaagccgagatcaaggaaggcctgcgtctgcgcaccctggcgtgcgagatcgttccggccgtctgcggttcctcgttcaagaacaagggcgttccgctggttctcgatgccgtcatcgactacctcccggctccgaccgagatccctgcgatcaagggcgtcagcccggacgacgagaccgtcgaagacgagcgtcatgccgacgacaacgaaccgttctcgtccctggcgttcaagatcgctaccgacccgttcgtcggtaccctgaccttcgcccgcgtttactccggcgtcctgagttccggcgactccgtcctgaactcggtgaaaggcaagaaagagcgcgtcggtcggatggtgcagatgcacgccaaccagcgtgaagagatcaaggaagtgcgcgcaggcgacatcgctgccctgatcggcatgaaggacgtcaccaccggtgacaccctgtgctcgatcgagaagccgatcatcctcgagcgcatggacttccccgagccggtaatctcggtcgctgtagagccgaagaccaaggctgaccaggagaagatgggtatcgccctcggcaagctggcccaggaagacccgtcgttccgtgtcaagaccgacgaagagtccggtcagaccatcatctccggcatgggtgagctgcacctggacatcatcgtcgaccgcatgaagcgcgagttcggcgtcgaggccaacatcggcaagccgcaggttgcctaccgtgagaccatcaccaaggacaacgtggagatcgaaggcaagttcgttcgccagtccggtggtcgcggtcagttcggtcattgctggatccgtttctcggccgcggacgtggacgagaagggcaacatcaccgaaggcctggtgttcgagaacgaagtcgtgggcggtgtggttccgaaggaatacatcccggcgatccagaagggtatcgaagagcagatgaagaacggcgtcgttgccggctatccgctcatcggcctgaaggctaccgttttcgatggttcctaccatgacgtcgactccaacgagatggcgttcaagatcgctgcttccatggcgaccaagcagctggcccagaagggcggcggcaaggtgctcgagccgatcatgaaggtagaggtggtgactcctgaggactacatgggtgacgtgatgggcgacctgaaccgtcgtcgtggtctgattcaggggatggaggacacggtttccggtaaggttattcgtgccgaggttccgctgggtgagatgttcggttatgcgaccgacgtgcgttccatgtcccagggtcgcgcgagctactccatggaattctccaaatacgccgaagctccgtcgaacatcgtcgaagcgctggttaaaaaacaaggttgattcagccctttaagtaagaggtttactgtcgtggctaaggaaaaattcgaacgtaacaaaccgcacgtcaacgtcggcaccatcggtcacgttgaccatggcaagaccactctgaccgctgcactgaccaaggtctgctccgacacctggggtggttccgctcgtgctttcgatcagatcgacaacgcgccggaagaaaaggcccgcggtatcaccatcaacacctcgcacgttgaatacgattccgctgttcgtcactacgctcacgttgactgccccggtcacgccgactacgtgaagaacatgatcaccggtgctgcccagatggacggcgcgatcctggtttgctcggctgccgacggccccatgccgcagacccgcgagcacatcctgctgtcccgccaggtaggcgttccctacatcgtcgtgttcctgaacaaggccgacatggtcgacgacgccgagctgctggaactggtcgagatggaagttcgcgatctgctgaacacctacgacttcccgggcgacgacactccgatcatcatcggttccgcgctgatggcgctggaaggcaaggatgacaacggcatcggcgtaagcgccgtgcagaagctggtagagaccctggactcctacattccggagccggttcgtgccatcgaccagccgttcctgatgccgatcgaagacgtgttctcgatctccggccgcggtaccgtggtaaccggtcgtgtagagcgcggcatcatcaaggtccaggaagaagtggaaatcgtcggcatcaaggcgaccaccaagaccacctgcaccggcgttgaaatgttccgcaagctgctcgacgaaggtcgtgctggtgagaacgttggtatcctgctgcgtggcaccaagcgtgaagacgtagagcgtggccaggtactggccaagccgggcaccatcaagccgcacaccaagttcgagtgcgaagtgtacgtgctgtccaaggaagaaggtggtcgtcacaccccgttcttcaagggctaccgtccgcagttctacttccgtaccactgacgtgaccggtaactgcgagctgccggaaggcgtagagatggtaatgccgggcgacaacatcaagatggttgtcaccctgatcgctccgatcgccatggaagatggcctgcgcttcgcgatccgcgaaggcggccgtaccgttggcgccggcgtggttgccaagatcatcgagtaatcgctgatcctgtcatcagaaaaggggccctccggggccccttttttcgttcgttggttaaatattgacaccctgtgggggcatccgtacaattgcgcctccttttaacgggcgtagtccgtccgttgggaatggtaaattggagtctgaggtcaaatgcaaaaccaacaaatccggattcggttgaaggcttttgaccatcgcctgatcgatcaatcaacccaggaaatcgtggaaaccgcgaaacgtactggtgctcaggtgcgtggtccaatccctctgccgacccgcaaggaacgtttcaccgtgctgatctctccgcacgtcaacaaagatgcgcgtgatcagtacgaaattcgtacacataagcgtgtactggacatcgtccagccgacggataaaaccgtcgatgcgctgatgaagctcgatcttgctgcaggcgttgaagtacagatcagcctcggctaatgccttcggcattggtcgtgtaacgctctgaaatgggcggccatagcgggtgaaagccccgtacactcaagaggtttacaacatgacaattggtgttgtcggtcgtaaatgcggcatgacccgcattttcaccgaggaaggtgtctctattccggttacggtcatcgaggtcgagccgaatcgcgtcacccagttcaagactgaagaaaccgatggctaccgtgcagtgcaagtcaccgccggcgagcgtcgtgcttctcgcgttaccaaagcgcaagctggtcactttgccaaggcgaatgtcgccgccggtcgcggcgtgtgggaattccgtctgggtgaagagcagtatgccgctggtgaccagatcactgtcgatctgttccaggcaggccagatggtagacgttaccggcgagtccaagggtaagggcttcgcgggcaccatcaagcgctggaacttccgtggtcaggataacacccacggtaactccgtttcccaccgcgtcccgggttccatcggccagtgccagactcctggtcgagtgttcaagggcaagaaaatgtccggtcatctgggtgcggagcgggtaaccgttcaatccctggagatcgtgcgcgtcgatgctgaacgcaatctgctgctggtcaagggtgccgttcccggcgctaccggcggtgatgtgatcgtgcgtccggcagccaaggctcgcggttaagggggaagctgagatgcaattgaatgtgaacggcgctcaggctatcgaagtctccgagcgtacctttggtggcgaattcaacgagaccctggtgcaccaggcagtcgtggcctacatggctggcggccgtcagggcagcaaggcgcagaagactcgctccgaagtctctggtggtggcaagaagccgtggcgtcagaagggcaccggtcgtgctcgcgctggcaccatccgtagccccatctggcgtgggggcggcaccactttcgccgctaaaccgcgtagccacgaacagaagctgaacaagaagatgtaccgcgcagcactgcgctccatccttgccgagctcgttcgtctggaccgtctggtcgtcgttgccgacttcgctgtcgatgcaccgaaaaccaagggcctggttgccaagctggacaccctgggtctgaaagacgtgctgatcgtgaccgatggtgtcgacgagaacctgtacctcgctgcgcgcaacctggcgcacgtcgatgtacgtgatgtccaaggttccgaccccgtcagcctgatcgcctacgacaaggtgctggtcaccgtgtccgccgtgaagaagttcgaggagctgctgggatgaaccaggaacgcgtattcaaagtgctgcttggtccgcacatctccgagaaagccacgggtctcgcggacggcaagagccaattcgttttcaaggttgccaccgatgcaaccaagctggaaatcaagaaggccgtagaaagcctgttcagcgtgaaggtacagcgcgtcactaccctgaacgtcaagggtaagaccaagcgcaccgctcgcggtctgggcaagcgtaacgactggaaaaaagcgtacatcgctctccagccgggccaagatctcgatttcgccaccagcgctgagtaaaggggtgcatcatggcaatcgttaagtgcaaaccgacttccgctggtcgtcgctttgtcgtcaaggtggtgaatcaggagctgcacaaaggcgctccctacgcaccgctgctggaaaagaaatccaagtctggcggccgtaacaacaacggtcgtatcaccacccgtcatatcggtggtggtcacaagcagcactaccgtctggtcgacttccgtcgcaacaaggatggcatccctgccatcgttgagcgcgtcgaatacgatccgaaccgcactgcacacatcgctctgctgaagtatgcagacggcgagcgtcgctacatcatcgcccccaagggcgttgctgcaggtgaccaactgatctccggtatcggtgcgccgatcaaggcaggcaacagcatgcctctgcgcaacatcccggtgggtagcactgttcatggtatcgaactgaagccgggtaaaggcgctcagatcgctcgctccgctggcgcttccgcccagctggtcgcgcgtgaaggtgcgtacgtaaccctgcgtctgcgctccggtgaaatgcgtaaagtcctggctgagtgccgtgcgaccctgggcgaagtctcgaactccgagcacagcctgcgttcgctgggtaaagccggtgctacgcgctggcgtggtgttcgcccgaccgttcgcggcgtggcgatgaacccggtcgaccacccgcatggtggtggtgaaggccgtacctctgctggtcgtcatccggtatcgccgtggggtcttcagaccaagggtaagaagactcgctcgaacaagcgtaccgataacatgatcgtccgccgccgcaagtaaatagagggataccacagtgccacgttcactgaaaaaaggtccgtttatcgatcttcacctgttgaagaaggtcgaagtcgcggtggaaaagaacgaccgcaagccgatcaagacctggtcgcgtcgttcgatgattctgccgcatatggttggtctgaccatcgccgtgcacaacggccgtcaacacgtaccggttctcgtcaacgaggacatggtcggccacaaactgggcgagttcgccgctacccgcacctaccgcgggcatgctgcggacaagaaagccaagcgttaaggggtaaggaagatggaagtagccgctaagctgtcgggcgctcgtatctccgcccagaaagcccgcttggtcgccgaccagatccgcgggaagaaggtgggcgaagcgctcaacctcctggctttcagcagtaagaaagccgccgagatcatgaagaaagtgctggagtcggccgttgccaacgctgagcacaacgaaggcgccgatgtggatgacctgaaggtctccaccgtcttcgtcaacgaaggtcgttcgctcaagcgcatcatgccgcgtgccaaaggccgtgctgatcgcatcgtgaagcggtcttgccatatcacggtcaaggttgcggacaagtaacggagtcgacagatgggtcagaaagtacatcccaatggcattcgcctgggtatcgtcaaggagcacacctccgtttggtacgcagaccgcaagaactatgcggattacctgtttgccgacctgaaggtgcgtgagtacctccaagacaaactaaaaagcgcgtccgtaagccgtatcgatattcatcgtccggctcaaaccgcacgcatcaccatccacaccgctcgtcccggcatcgtgatcggcaagaaaggtgaagatgttgagaaactgcgccaggacctgaccaagcaaatgggtgtgcccgtgcacatcaacatcgaggaaatccgcaagccggaactcgatgccatgctggttgcgcagagcgtagcccagcagctggagcgtcgcgtaatgttccgtcgcgccatgaagcgcgccgtacagaacgccatgcgcattggtgccaagggcatcaagattcaggtcagcggtcgtctgggtggggctgaaatcgcccgtaccgaatggtatcgcgaaggtcgtgtgcccctgcacaccctgcgcgccgatatcgactatgccacctacgaagcgcacaccacttacggtgtgatcggtgtcaaggtttggatcttcaagggcgaggtcatcggtggccgccaggaagagctgaagccggtagcacccgctcctcgtaaaaaagctgctaggtaaggagtacgcaaatgctgcaacccaagcgtacgaagttccgcaaacaaatgaccggccacaaccgtggtctggctcatcgtggtagtaaggtcagcttcggtgagtacgcactgaaggccactagccgtggccgccttactgctcgtcagatcgagtccgcgcgtcgtgcgctgacccgtcacgtgaagcgtggcggcaagatctggatccgcgtattccctgacaagcctgtcaccaagaagcccctcgaagttcgtatgggtaaaggtaagggtggggtcgagtactgggtagcccagatccagccgggcaaggtcctgtacgagatcgagggtgtttccgaagagctggcgcgtgaggctttcgccctggctgctgcaaagctgcccctcgccacctcctttgttaagcggacggtgatgtgatgaaagcgaatgaacttcgtgaaaaatccgttgagcagctgaacgagcaactgctcggcctgctgcgcgaccagttcaatctgcgcatgcagaaagcaactggccagttggggcagtctcacctgctctcgcaggttaagcgcgacatcgctcgcgttaaaactgtgctcaatcagcaagcaggtaagtgatcatggctgaagctcagaaaaccgtccgtacgctgaccggccgcgtcgtcagcgacaaaatggacaagaccgtcaccgtactgatcgagcgtcgcgtcaagcacccgatctacggcaaatacgtcaagcgttcgaccaaactgcacgcacacgacgaatccaatcagtgccgcattggtgacctggtcaccattcgcgaaacccgtccgctggccaagaccaaggcctggaccctggttgatatcgttgaacgcgcggtggaagtctaaggactaggggtcggagaaattatatgattcagactcaatccatgctcgatgtcgctgacaacagcggcgcgcgtcgtgtgatgtgcatcaaggtgctcggcggttcccaccgccgttacgccggcatcggcgacatcatcaaggtcaccgtcaaggaagcgattccgcgcggcaaagtgaagaagggccaggtcatgactgccgtggtcgttcgcaccaagcacggcgtgcgtcgtaccgacggttccatcatccgcttcgacggcaacgccgccgtcctgctgaacaacaagcaggagccgatcggcacccgtatctttgggccagtgactcgtgaactccgtaccgagaagttcatgaagatcgtctcgctcgcccccgaagtgctgtaaggagtagccgtcatgcaaaagattcgtcgtgacgacgaagtaatcgtcattgccggcaaggacaagggcaagcgtggcaaggtgctgaaggttctcgctgacgaccgtctggtcgtcggcggggtgaacctgatcaagcgccacaccaagcccaatccgatgctcggccaacagggcggtatcgtcgagaaggaggcgcctctgcacgtctccaacgtcgccatcttcaatactgaaaccagcaaggctgaccgcgttggcttcaaggtagaagacggtaagaaaattcgtgtcttcaagtcgacccagaaaccggttcaggcttgaggctgctaggtagatcaccatggcacgattgaaagaaatttatcggaaggaaatcgcgcccaagctgaaagaagagcttcagctggcgaacgtgatggaagttccgcgcgttaccaaaatcaccctgaacatgggtcttggcgaggcggtcggtgacaagaagatcatcgagaacgccgtagccgatctggaaaagatcactggtcagaagccggtcgtgacttacgctcgtaagtccatcgcaggcttcaagatccgtgaaggctggccgatcggcgtcaaggtcaccctgcgtagcgaccggatgtacgagttcctggatcgtctgctgtccatctccctgccgcgcgtgcgtgacttccgcggcctgaatgccaagtccttcgatggtcgcggcaactacagcatgggcgtgaaagagcagatcatcttcccggaaatcgattacgacaagatcgatgcgctgcgtggcctggacatcaccctgaccaccaccgctcgtacggatgacgaaggtcgcgccctgctgcgtgctttcaaattcccgttccgtaactgattggagtaggaacatggctaaagagagcatgaagaaccgcgagctgaagcgtcagctgacggtagccaagtacgccaagaagcgtgccgagctgaaagcgatcatcgctaatccgaactcctctgcggaagagcgttggaatgcccaggtcgccctgcagaagcaaccgcgtgacgccagcgccagccgcctgcgtaaccgttgccgcctgaccggtcgtccgcacggcttctaccgcaagttcggcctgagccgtaacaagctgcgcgaagccgccatgcgcggcgacgtaccgggtctggtgaaagccagctggtaatcgcagcgaacggtgtcgccagtcggcaccgttgatcgcgacatcgaatcaagcccctcatggggcttgattcgttttggcgtgatctctagaatacccggctcccctgagcctgggtttgtttcgcctggcgtttatgggcgaattgaagttgaaggcttattcttttgtatcaggagcgttaagcccatgagtatgcaggacccgttagcagacatgctaactcgcatccgtaatgcccagatggctgaaaagaccgtcgtaagcatgccgtcctcgaaactgaaagcggcggtagccaaagtcctgaaggacgaaggctatattgcggatttccagatcagctcggaagtaaaaccccagctgtccatcgaactgaagtacttcgaaggcaagcctgtcatcgaagaggtcaagcgcatcagccgtcctggcctgcgtcagtacaaatccgttgagcaactgccgaaagttcgtggcggcctcggtgtgtcgatcgtctccaccaacaaaggtgtgatgaccgatcgtgctgcccgtgctgctggtgttggcggcgaagtgctctgcactgtgttctaaggggaatcagcatgtctcgcgttgctaagaaccccgtcaagctgcctgccggcgttgaaatcaaactggctggtcagcaactgtccatcaagggcgccaaaggtgctctggagctcaaggtccatccttcggtcgaagtgatccaggacagcggtgagctgcgttttgctgcgcgtaacggcgaccagcagactcgcgccatggctggtaccacccgtgctctggtgaacaacatggtagtcggcgtcagccagggcttcgagcgcaagctccagctggtcggcgttggttacaaagcgcaggccaagggccaagtgctgtccctgtccctcggcttctcccatccggttgattacgaactgccggccggcatcgtcgctgagacccccagccagaccgatatcctgatcaagggtatcgacaagcagctggtcggtcaggttgctgccgaaattcgcgacttccgtccgccggagccttacaaaggcaagggcgtgcgttacgccgacgaagtcgtccgtcgtaaagaagccaagaagaagtagggcatagcaaatgagcgtcaagaaagaaacccgtctgcgtcgcgctcgcaaggcacgcctgaagatgcgcgagctggaaaccgtacgcctctgcgtgtaccgctcttcccagcacatttacgcccaggtcattgcggccgacggcggcaaggtcctggccagcgcctcgaccctggacaaagacctgcgcgaaggtgccaccggcaacatcgatgcagccaagaaagttggtcaactggtcgccgagcgcgccaaagcggccggcgtcacccaggtggcgttcgatcgttctggcttcaagtaccacggccgtgtgaaagcgctggctgatgccgctcgtgaaggcggactggagttctaagttatggcaaacaacgagcaaaagcgcgacgaaggctacatcgagaagctggttcaggttaaccgcgtcgccaaaaccgtaaaaggtggccgtatcttcgctttcaccgcactgaccgtggtgggtgatggcaagggtcgcgttggtttcggtcgtggcaaggcgcgtgaagtgccggccgccatccagaaagcaatggaagccgctcgccgcaacatgatccaagtcgatctgaacggcaccaccctgcagtatccgaccaagtccgcccatggcgcctccaaggtgtacatgcagccggcttcggaaggtaccggcatcatcgccggcggcgccatgcgtgccgttctggaagtggctggtgtgcagaacgtcctggccaagtgctatggctccaccaatccggtgaacgtggtttatgccaccttcaagggcctgaagaacatgcaggctccggaagcagtagcggccaagcgtggcaagagcgtcgaggagattctctaaccatggcaactgtcaaagtcactctggtcaagagcctgaacggccgtctggccaaccacaaggcttgcgtcaagggtctcggcctgcgtcgcatcaatcataccgtcgaagttcaggacactcctgagaaccgcggcatgatcaacaaggcctactacctgctgcgtgtggagggttaatccatgcaactgaacgatctgcgttccgcgccgggtgcccgtcgcgaaaagcaccgtccgggccgtggcatcggtagcggtctgggcaagaccggtggccgtggtcacaaaggtctgacctcccgctccggtggtaaggtcgctccgggcttcgagggtggtcaacagcctctgcaccgtcgcctgccgaagttcggcttcgtttccctgaaggccatggatcgtgctgaagtacgcacctccgagctggccaaggtcgaaggcgacgtcgtcagcctgcagaccctgaaggatgccaacctgatcaaccagcacgtacagcgcgtcaaagtcatgctgtccggcgaagttggtcgtgcggtcaccctgaaaggtatcgccgccaccaagggtgcgcgtgcggctatcgaagcagctggcggtaaattcgaggactaaatggctaagcaaggtgctctctctgcgctaagcaacggcggtctgtccgagctctgggcacgtctgcgtttcctgttcctggcgatcatcgtctatcggatcggcgcgcacatcccagttccgggcatcaaccccgatcgcttggcggcactgttccggcagaacgaggggaccattcttagcctcttcaacatgttttccggcggcgcgctggagcgcatgagtatctttgcactggggatcatgccgtacatctcggcatcgatcatcatgcagctcatgaccgctatcagcccgcagctggagcagttgaagaaagagggtgagtctgggcgtcgcaagatcagccagtacacccgctacggtactgtagtcttggcactggtccaggccatcggcatgtccgttggcctgggcagccagggcgtagccttctccaacgacttcggcttctacttcgtggctgtcaccaccttcgtggctggtgccatgttcatgatgtggctgggcgagcagatcaccgagcgcggtgtcggcaacggcatctcgatgttgatcttcgctggtatcgttgcaggcctgccgcgcgccatcggtcagtctttcgagtctgcccgtcaaggtgacatcaacatcttcgccctgatcggcgtcggcctgctggccgtggcgatcatcgcgttcgtggtgttcatcgagcgtggccagcgtcgcatcgcggtgcattacgccaagcgccagcaaggccgcaaggtgtttgcagcgcagaccagccatctgccgttgaaggtgaacatggcgggtgtgattcccgcgattttcgccagcagtatcctgctgttcccggcgtccctgggctcctggttcggtcagtcggaaggcttgggttggttgcaggacgtcgcgcaagcgatcgctccggggcagccgctgaacatcttgctgttcactgcagggatcgttttcttctgcttcttctatacagcgctgatgttcaacccgaaggacgtggcggagaacctcaagaagtccggtgcatttattccgggcatccgtccgggcgaacagtccgctcgctacatcgatggcgtgctgacccgtttgaccatgttcggtgctctgtacatgacggctgtctgcctgctgccccagttcctggtggttgcggcgcacgtgccgttctatcttggcgggacctcgctgttgatcgtggtcgtggttgtcatggactttatggcccaggtgcaatctcacctcgtttctcaccagtatgaatccctgatgaagaaagccaacctgaagggctacggcagcggcatgctgcgctgatagacccgtaaggttcgaggagttggtgatgaaagttcgtgcatcggtcaagaagctgtgccgtaactgcaaaatcatccgtcgcgatggcatcgtgcgggtgatctgcagcgcggaaccgcgtcacaagcagcgccaaggctgattgtgatccacgcgtgataacccggcagctagtgtgctgccgggttgattatttgctattacagcgctaatatccgcgccctttcttggcttcctgggcgcagggtagctgtcaattggagtttttctgaatggcccgtattgcaggcgtcaacattccggataacaagcacactgttatctcgctgacctacatctatggtgttggtcgcactactgctcagagcatctgcgcagccaccggcgtaaacccggctgccaagatcaaggacctgagcgacgagcagatcgatcagctgcgtaacgaagtcgcgaagatcaccaccgaaggtgacctgcgtcgcgaaatcaacatgaacatcaagcgtctgatggacctcggttgctaccgcggtctgcgtcatcgtcgcggtctgccggttcgcggtcagcgtaccaagaccaacgcgcgtacccgcaagggcccgcgtaagccgatccgcaagtaatcgcgtaggaatctagtcatggcaaaacctgctgctcgtccccgtaagaaagtcaaaaagacagtggtcgatgggatcgcccacatccacgcgtctttcaacaacaccatcgtgaccatcaccgaccgtcagggcaacgcactgtcctgggcgacctccggtggttccggtttccgcggctcgcgtaagagcaccccgttcgctgcccaggtagcggccgagcgtgccggccaggctgccctggaatacggtctgaagaacctggacgtcaacgtcaagggcccgggcccgggccgcgagtccgccgttcgcgctctgaatgcttgcggctacaagatcgccagcatcaccgacgtaaccccgatcccgcataacggctgccgtccgccgaaaaagcgtcgcgtgtaataggagacagtgagaaatggctcgttacattggtcccaagtgcaaactgtctcgccgtgaaggcaccgacctgttcctgaagagcggcgcccgcgccctcgactcgaagtgcaaggctgaaaacgttcctggccagcatggccagcgtcgtggccgtctgtccgactacggtctgcagctgcgtgaaaagcagaaagtacgtcgcatctacggcgtgctggagcgtcagttccgcggttactaccaggaagcttcccgtcgcaagggttctaccggtgagaacctgctgcaactgctcgagtgccgcctggacaacgtcgtataccgcatgggcttcggttccactcgttcggaatcccgccagctggtatcccacaaggccatcaccgtcaacggtcagaccgtcaacatcccttcctaccaagtgaaggccggtgacgtcgtagctgttcgcgaaaaatcgaagaaccagctgcgtatcgctcaggctctggaactctgtggccagcgcggtcgcgtcgagtgggtcgaagtcgacctcgacaagaaggctggtaccttcaagagtgctccggctcgcagcgacctgtccgctgatatcaacgaaaacctgattgtcgagctctactccaagtaagggctagaaaataggtgcatccatgcagagttcggtaaatgagttcctgaccccccgccacatcgatgtgcaggtggtcagtcaaacccgcgccaagatcacgctcgagcctctcgagcgtggttttggtcacaccctgggcaacgcgctgcgtcgcatcctgttgtcctccatgcctggctgcgcagtggtcgaggccgagatcgacggcgtactccacgagtactcggcgatcgaaggtgtgcaggaagatgtaatcgagatcctgctgaacctgaaaggtctggccatcaagctgcacggtcgtgatgaagtgacgctgaccctggctaagaagggctcgggtgttgtgactgctgccgatattcagctggatcacgatgttgagatcatcaacggtgaccacgttatcgccaacctggcagacaacggcgcgctgaacatgaagctgaaggtagctcgtggccgtggctacgagcctgccgatgcacgtcagagcgacgaagacgaaagccgcagcatcggccgtctgcagctcgacgcatcgttcagcccggtccgtcgtgtctcctacgtggtggaaaacgcccgtgtcgagcagcgcaccaacctggacaaactggtcctggacctggaaaccaacggcaccctggatcccgaagaggctatccgtcgcgccgctaccatcctgcaacagcagctggcagcgttcgtggacctcaagggcgacagcgaacccgtcgttgaagagcaggaagacgagatcgatccgatcctcctgcgcccggtcgatgacctggaactgaccgtacgttcggccaactgcctgaaggcggaaaacatctactacatcggtgacctgatccagcgcaccgaagtggagctgttgaaaacgccgaacctgggcaagaagtccctgaccgaaatcaaggacgttctggcttcccgtggtctgtccctcggtatgcgcctcgataactggccgccggcaagtcttaagaaagacgacaaggccactgcctgatcgtcgtaactaccgaacgtaaagtttggaaaggaattgaaccatgcgccatcgtaaaagtggtcgtcacctgagccgcaccagcgcgcaccgcaaggctatgttccagaacatggcggtgtcgctgttcgaacacgaactgatcaaaaccaccctgcccaaggccaaggaactgcgtcgcgttgccgagccgctgatcaccctggccaaggaagacagcgtcgccaaccgtcgcctggctttcgaccgtacccgttcgaaagctgccgttggcaagctgttcaacgacctgggcaagcgctacgccaaccgtccgggcggctacctgcgcatcctgaagtgcgggttccgcgctggcgacaacgcccccatggcgtacgtcgagctggttgatcgtcctgtcggcggtgaagtcgtagaagctgccgaataaggcatctgctgcacaagaaaccgggcccaggcccggtttttttattacctgccttaaagtttttatctatcggctcgctgtctttaataaattggattgtgggagggctgtcattcatccttaacctgcttttacgaaaagctacgttcggataagcgagatcaatgcaaagggcgcttggttcagccgacaggttgtcctccgccaatccctggtccacgctgatgatttccgtgtagccgcttcgcttcatagcacgttagccgttgaggagagagtaaatggaagagaagacccgcctgaccactgccgctggcgcaccggtggtcgataaccagaacgtgcagaccgccggtccgcgtggcccgatgttgctgcaggacgtgtggttcctcgagaagctcgcccacttcgatcgcgaagtgatccccgagcgacgcatgcatgcgaaaggctccgcggcctacggcaccttcaccgtcacccatgacatcaccccctacacccgggcgaagatcttctcccaggtcggcaagaagaccgatatgttcctgcgcttctccaccgtcgccggtgagcgtggcgcggcggatgccgagcgagacatccgcggcttctccatgcgtttctacaccgagcagggcaactgggacctggtcggcaacaacaccccggtgttctatctgcgcgacccgctcaagttccccgatctcaaccacgtggtgaagcgtgacccgcgcaccaacctgcgcaatgcgaccttcaagtgggactttttctctcacctccccgagtcgctgcatcagttgaccatcgacttcagcgaccgcggtctgccgaagagctatcggcacatccatggtttcggcagccataccttcagcttcatcaatgcgaacaacgagcgcttctgggtcaagttccacttcaagacccaacagggcatcgagaacctgaccaacgccgaggctgccgaagtgatcgcccaggaccgcgagagttcgcagcgcgacttgtacgagagcatcgagaaaggcgacttcccgcgctggaagatgtacgtgcagatcatgcccgagaaggaagcggccacctatcgctacaacccgttcgacctgaccaaggtctggccccacggtgactacccgttgatcgaagtgggcttcttcgagctgaaccgtaacccggacaactacttcgccgaggtcgagcaggccgctttcacgccggccaacgtggtgcccggtatcggtttctcgccggacaagatgctccagggccgtctgttctcctacggcgacgcccatcgctatcgcctgggcgtcaaccaccaccagatcccggtgaacgccgcgcgttgcccgcaccaggtctaccaccgcgatggcggcatgcgggtggacggcaacaacgcccatcagcgcgtcacctacgagccgaacagcttcaaccagtggcaggagcagcctgacttctccgagccgccgctgagcctggagggcgcggcggaccactggaaccaccgggtggacgacgactactacagccagcccgccgcgctgttccatctgttcaccgacgagcagaagcagcggctgttcgccaacatcgccgaagacatccgcgatgtaccggaacagatccagcgtcgccagatcggcctgttcctcaaggtcgacccggcctacggcaaaggcgtcgccgacgccctcggcctgaagctggactgatggcctgatgaggcccccggcccccttcctaggaagggggcttttttatctgcattggcttgacccggatcaggcggagccgggagcatatggggctagattcctagttttctccagggagagccccccgatgcaaggccatccggaagtcatcgattacctcaacacgctgctgaccggcgagctggccgcgcgcgaccagtacttcatccactcgcgcatgtacgaggactggggcttcagcaagctctacgagcgcctcaaccacgagatggaggaggagacccagcacgccgacgccctgctgcgccgtatcctcctgctcgaaggtacgccgcgcatgcgtcccgacgatatccacccgggcaccacggtgccggagatgctcgaggccgacctcaagctcgagcgccatgtccgcgccgcgctggccaagggcatcgccctctgcgagcagcataaggacttcgtcagccgcgacatcctcaaggcccagttggccgacaccgaggaagaccacgcctactggttggagcaacagcttggcctgatcgccaggatgggcctggagaactacctgcagtcgcagatctgaccctacccgcggatacgaaaaagcccctgcgcctcacggccgcaggggctttttcatgagcgcccggcaatcaggcgcgatcgcgttccagcaacggcttgaggaagtggccggtgtgcgactggggcatctcggccacctgctctggcgtgccgttggcgatgatctggccacccttggagccgccctcggggccgaggtcgaccagccagtcggcggtcttgatcacgtccaggttgtgctcgatcaccaccacggtgttgccgtggtcgcgcaggcggtggagcacgtcgagcagttgctggatgtcggcgaaatgcaggccggtggtcggttcgtcgaggatgtacagggtcttgccggtatcgcgcttggacagctcgcgggacagcttgacccgctgcgcctcgccgcccgagagggtggtcgcgctctggcccagcttgatgtaggacaggccgacgtccatcagcgtctgcagcttgcgcgccagggcggggacggcgtcgaagaactcgcgggcttcctcgatggtcatctccagcacctcgtggatgctcttgcccttgtagcggatctccagggtctcgcggttgtagcgcttgcccttgcagacatcgcagggaacgtagatatccggcaggaagtgcatctccaccttgatcacgccgtcgccctggcaggcctcgcaacggccgcccttgacgttgaacgagaagcggccgggaccgtagccgcgcgagcgggcctccggcacgccggaaaacagttcgcggatcggcgtgaacaggccggtataggtcgccgggttggagcgcggggtacgaccgatcgggctctggtcgatgtcgaccaccttgtccaggtgctgcaggccgtcgaacgagtcgtacggcgccacttccagggtagtcgcgccgttcagcgcggtggcggtgatcgggaacagggtgttgttgatcagcgtcgacttgccggagcccgagaccccggtgatgcaggtgaacaggccgaccgggatttccaggttgacgttctgcaggttgttgccgcgggcgcctttcagcttcagcagcttcttcttgtcgcgcggggtgcgcttggccggaaccgcgattttcttgcgcccggaaaggtacttgccggtcagcgagtcggggtggttcatcacctggtcgggcgtaccttccgccactacctggccgccgtgcacgccggcgcccggaccgatgtcgacgacgtagtcggcgagtcggatcgcgtcctcgtcgtgctcgaccacgatcaccgtgttgccgaggttgcgcaggtgggtgagggtgccgagcaggcgctcgttgtcgcgttggtgcaggccgatcgagggttcgtcgaggatgtacatcactcccaccaggccggcgccgatctggctggccaggcggatgcgctgggcttcgccgccggacagggtgtcggcgctgcggtcgagggtcaggtagtcgaggccgacgttgaccaggaattgcaggcggtcgcggatttccttgaggatcttcgccgcgatctcgccacggcggccggtcaggctgagtccggcggcatactcgcaggcttcgccgaccggcatcgcggtgatcgccggcagcgtccggtcgccgacccacacatgccgcgcctcgcggcgcaggcgggtaccgtggcaatccgggcagggctgggtgctgaggaacttggccagctcctcgcggaccgtggccgactcggtctcgcggtagcgccgctcaaggttcggcaggatgccttcgaaggggtgcgagcgcttgacgatgtcgccgcggtcgttgagatagcggaagtcgacgttttcccggccggagccgtagagcaccaccttctggtgttcggcgccgagttcgtcgaagggttcttccaggctgaagccgtaatgctgggccagcgaaccgagcatctggaagtaatagacgttgcgccggtcccagccgcggatcgcgccctcggccagggtcaactcgccgttgaccacccggcgcgcgtcgaagaattgcttcacgccgaggccgtcgcaggtcggacaggcgccggccgggttgttgaaggagaacagcttgggttccagctcgctgatagagtggccgcagaccgggcaggcgaagcgcgccgagaagatgatctcctcgacatcctcgtcctcgtccatcggtgctaccagggcgataccgtcggccagggacagggcggtctcgaacgactcggccaggcgttgctggaggtccgcgcgaaccttgaagcggtccaccaccacatcgatgctgtgcttcttctgcttatccagcttcggcacttcgtcgagttcgtagagcttgccgtcgacccgggcgcggacgaagccctgcgcgcgcatctcgtcgaacaccgccaggtgctcgcccttgcgctcgcggatcaccggcgccagcagcatcagcttgctgccttccggcagggccaggacctggtcgaccatctggctgacggtctgcgcctccagcgggatgtcgtggtccgggcagcgcggggtaccgacgcgggcataaagcaggcgcaggtagtcgtagatctcggtgatcgtacccacggtggagcgtgggttgtgggaagtggacttctgttcgatggaaatcgccggcgacagcccttcgatggtgtccacgtccggcttctccatcatcgacaggaactgccgggcgtaggccgagagggattccacgtagcgccgctggccttccgcatagagcgtgtcgaaagccagggaagacttgccggaaccggaaagaccggtgatcacgatcagtttgtcgcgtggcagtgtgaggtcgacgttcttcaggttgtgggtacgcgccccacgaatcaggatcttatccacagcggcctcgcatggcgggcgaaaaccgctgattatacggctggccgctagcgcgcggcaaagtggcgcgcctgtgccgcgagggggcggactggtagaatgcgcggcatttttccggcgcgggcattgccccggccgcccaggagcgggcggcggcgccatcggcaggggcatgaggccttgccctgcagcggtttcttccatgagggtgttatgcacgactcacatactgagcggatgagcggtaccgaaacgcgagcggccgtcgggctgtcactggtattcgccttccgcatgctcggcatgttcatggtcctgccggtgctggccacctacggccaggacctggccggcgcgaccccggcgctgatcggcctggccatcggcgcctatggcctgacccaggcgatcctgcagattcccttcgggaccatttccgaccgcatcggccggcgcccggtgatcgtcgtcgggctgctgatcttcgccgccggcgcggccctcgcggccaatgccgactccatctggggggtgatcgccggccgcgtcctgcagggcgccggggcgatctcggcggcggtgatggcgctgctctccgacctcacccgcgagcagcaccggaccaaggcgatggcgatgatcggcatgagcatcggcgtctccttcgccgtggccatggtgctcggcccggtgctgacccatctgttcggcctgcatgggctgttctggttcaccgccgggatggcgctggtcggcctgctgctgatcctgttcttcgtcccgcagccggaccacatgacccagcaccgcgaatccagcgtggcgcgccaggccctgctgccgaccctgaagcacggcgacctgctgcgcctggacgccggcatcctgatcctccacgccatcctcatggccagcttcgtcgccttgccgctggcactggtgcacgaggggggcctgcccaaggagcagcactggtgggtctacctgaccgcgctgctggtcggtttcttcggcatggtgccgttcatcatctacgccgagaagaagcgtcgcatgaagcgcgtgctgaccggcgcggtggcgaccctgctggcctgcgaactgttcttcctggtcttcggtcacagcctggccatgctggtggtcggcacggtggtgttcttcactgctttcaacctgctcgaagcctcgctgccgtcgctggtcagcaaggtctcgccggccggcggcaagggcacggcgatgggggtgtattccaccagccagttcctcggcgcggcgctgggcggcatcctcggcggctggatgttccagcacggcgggctgagcatggtgttcatcggatgcgcggtgctcgctgccctctggctggcgattgctgttaccatgcgcgaaccgccttatgtgaccagcattcgcctgccgctcgcgcccgccgcgctgcaggacgcggtgctggtccagcgattcagggcgttgcccggtgtggcagacgccgtggtggtggccgaggaggccgccgcctatgtcaaagtggatacccaacaagtggatcgcaccgccctcgagcgcctggcccaggccgcgccgggcggatgctgaaccttaggagaacgtcatggcccgtggggttaacaaagtcattctggttggtaacgtcggtggtgacccggaaacccgctacatgcccaacggcaatgcggtgaccaacatcaccctcgccaccagcgagagctggaaggacaagcagaccggccagcaacaggagcgcaccgaatggcaccgcgtggtgttcttcggccgcctggcggagatcgccggcgagtacctgcgcaagggttcccaggtctacgtcgaaggcagcctgcgcacccgcaagtggcagggccaggacggtcaggatcgctacaccaccgagatcgtggtcgacatcaacggcaacatgcagttgctcggcggccgcccctccggcgacgattcgcagcgcgccccgcgcgagcccatgcagcgcccgcagcaggccccgcagcagcagtcgcgtccggccccgcagcagcaaccggcgccgcaaccggcccaggactacgacagcttcgacgacgacattccgttctaagcgacgcccttgcggcgcggcccgtccgcgccacgggcagaccttcgaagaccccctgccgccctcgggccgcagggggtcttcgttttcaggcgacgccgcgctgcaagggcacttcgtccaggccgcctatggcggatagagcttcccgcatggcactgagcttaaggcaggtttcgcgatactcgtgggccggttccgaatcgcctaccagaccgcagccggcgaacaggtagccccggcccggcgtgagcagggccgagcgcagcgccaccaggaaatcgccgttgccttcgccgtcgagccagcccagcggcgcggcgtaccagccgcggtccatcccttcgtgctggcggatgtagtccagcgccgcgctgcgtgggtagccgcccaccgcgggggtcggatgcagcgcctgcagcagccgcaggatgccgcctgcgtcagcgaggcgggcgcggatcggcgtgttcaggtgctggactcgcgccagtcgtttcagaccgggcgcatcggggatttccagcacctcgctgaagggttccagggccgtacggatcgcctccaccaccaactggtgttcgtgcctgtccttggcgctgtccagcagggcctgtccgagccgcgcatcttcctgggcatcgccgccgcgggcgatggtcccggccagggcatgggtgagtgcctcgccggcgcgaatgcggaccaggcgttccggggaggcgccgaggaagcaggcgttgccgcggcgacaggcgaacagctgggcgtcggcatgttgcagacgcaggtgttcgatgacctgccacggctcgatgtcgccgagaggccgggcctgggtgcgggccagcacgaccttgccgaagcgtccctggcggacactgcttaccgcgtcgctcaccttggcttcccattgcctgcgctcctgcgccgaagcgtcgccctgcgcgccagcggtcggccccgagggccggcgtctggccggctgcctcaggcgcagtagcgccgagcagtggtaggcggccagggccagggcatcttcgccgggcttggccaggtgttggcagagtacccggtagcgttcgccctcgcgcagcacggtgatgccggcgagcatcaggctggcatcggcgaaggcttgccagtgttcctcgcgcgggccgcgcggatcgaagcggaatccgccgcacaggcgcggcgccagcgggccctcgaccacggcgtcggcgcagagcaattgccagttttcctcgatccgggcgaagcgctgttcgccgtggccttgcagctccagggcgcagccccaggcgaagaacgccagctcgggctgttcccagtacaggcagggcgtttgccggtcgtcccaggcaccgaatacctgcagcgggtccaatgggtcgatctcgaacgacgccgccaccaagaccggacgatcgagcgcctgcgcctggccgatggcgcgctcgaaggtgccgcgcaaggcgtgcaggcactggctcaggggcgccagccggctcatgcggcaccccgtgtctggcgccagtacttgatctgctcggcgatgtaccagtggatgatctgcgcgaacagtccctcgacgaagggcgcgtcgagtccgttttcctcggcccagcgggcgcgctcggggagcatcgcggcgacccgctcgggtgccggaatcgccgcctcgctggccttgaagcgcgacgccgccttgacgtagtccatgcggcggccgagggcctggacgatatccaggtcgatccggtcgatggcctcgcggatgtccgccaggccggtgcagtcttcgggagttttcatcatgcaacctctcgggaaagggcgtcgggatgtgcgaggcggcgcagcaggtgctcgatcaccgcatcgcgcccctcgctcaggtagaagtggccgccaggaaagcgccgcagcctggcgggagtccggctggcgtcgctccaggcctgcgcctcggcggcgctgacttcctcgtcgtgctcgccgaggaggacgtcgagggcgcaggccagggcgatgggctgcgcccgtcggtaggtctcgatcgcctggtagtcggcgcgcaggatcggcaggaacagcgcgcgcaggtcggcgtcctcgagtagctcgctggcgccaccctggcggcggacgtcctccagcagcgccgcctcgtcgccgcggtgcaacgcgccgccgcgttgccggtgcggtgccggatgggcggagacgaacaggtggcgcagcggcgcgccggcgctttccaggcgcagggcggtttcgtaggccagcgccgcgccgagactgtggccgaacagcgccaggggcgcgtcggcgaaatcgcgcagggcgagggcggcgccgtcggcgaggtcctccaggcgggtggccggctcctcgttgaagcggtcctcgcgacccgggtactgcagggcaagcaggtcgatgtctggtggcaggcgttcgctccagctacggaagaagctggcgcttccgcctgcatgggggaagcaggccaggcgcaggcgcggcatcggcgtcaggcggaacggccggacccaggcggcgctcatgcgcgggcctccagctcgcggcgcaggcgctcgcgcaggtccttcttgctgatcttgccgatgccggtctgggggaaggccgggaccagctcgatgcggtccggcaccttgaacgcggccagcccgcaggcgtgcaggtattgcttcagcttcagcgccgagggcgccggctggcgcgggatgacgaaggcgcaggtgcgctcgccgagcaggctgtcgggcatcgccacgacggtggcgtcgtgcacctgcggatgggctatcagcaggttctccacctcttccgcggcgatcttctcgccgccgcggttgatctggtccttgtcgcggccctccaccaccaggtagccgtccttgtcgcggctgacccggtcgccggtgcggtagaagccgtccgcgctgaaggccttggcgttgtgttcgggcaggcggtagtagccgcggatggtgtagggaccgcgcacggtcagttcgcccacctcgccggggccgacctcgcggccctcggcgtcgaccacccgcacttcgtcgtccggcgacagcggccggccctgggtatgcagcacgcgttcgggcggatcgtccaggcgggtgtagcagatcagcccctcggccattcccagcacctgttgcaactggcagccgagcaccggttcgacgcgttgcgcggcactgctgccgagcctggagccgccgacctggagcagacgcaggctggatagatcggcgcggcggctttcctgggcatccagccagagcatcgccagcggcggtaccagggcggtgtgggtgacccgttcacgggcgatcagggcgaagcaatgctcgggatcggcgcgctggctgaccaccacgcggccgccggccagcagcgtgccgatcactccggggcagcagagagtgaagttgtgcgccatcggcaagccggtgaggtacaccgtgtgctcgtcgaagccgcagacctcggcgctggcgcggacgttgtagagatactcgcgatgacgccggggaatcagcttcggcgtgccggtggtgccgccggacaactggaagcaggcgatatcctcggcgcgggcggcgcagtcttccagcgcgtcggcctggtacagcggtgccagcgcttgcagcggcgcctcggcctcgccgtggatcagcgccatccggcaggcgccgctggcgagcagctcacgggccatcggccgtgggtcgaagccgtcgatccgttcggcgccgatgtaggccttggcctcggcgaagcggcagaaaccgctgatctcatgctggcgatgggcggggagggcgagcaccgggcgtacgccgagctggaacagggcgaagcaggtctcgacgaaggcgatgccgttgggcaggtgcagcactaccgtgtcgccatgtgcgaggccggcctggcgcagtccggctgccagacggcggcagcgctggagcaggtcggcatagctgagccgctggtcgtcgtcgcagagcgcgatccgccgcggatggcgcgcggcgctggcggccagggcttcggcgaagttctggtcctgccagtggccagcgtcgagatagcggcggacgaaggcggcgggccagtcgggggcgtcgtcgacggccgatggggtgacgggcgaggaagtcatgcgatctccgtggatgcggtcgattgccattgttgggaaatgagatttattatcattggcgggcggcagggaccgcgcaagcccgcgcctttcgattgcggggctttttcattcgctgcaggggcggagtgcagggcgctttgtccatctccgctaaaaagtccccctgcccccacgtatccaggaaggcgtcgccgcgtcggcagcgcccgggctacaggaaaacctgatgaccatcaccatcattgctccgccacaggccgatgccgccgcgccggcaccgggcaaccggcccggcgtcgcgcacatcgatccgaacatgaagctggtgaccggaaccttctgttcggccagcgaggactggttcgaggaaccgctggagcgcggcctgcgcctgatcctcgtgcagagcggccagttgcgctgccggattcccggccagcccgagcacctcatcgaggggccgagcctgtgcaccatcgccaacgatggcgacttcacctcggcgcagatctacggcaccgacaagccgttgcgctacaccatcgtccagctcggcgtcgaagccctggacagccgcctcggctggctgcccgagcaactgatacgccgccccggcggcgatccgcggatcatgagctgcccggcgccgcgggcgatgcaggcgttggcctcgcagatcgccacctgccagatgctcggtccgacccgcgatctctacctcggcggcaaggccctggagttggccgcgctcagcgcacagttcctttccggcgaggggcgccccgtcgaggagccgcgcatcacctgctcggaggtcgagcgcatccacgccgcccgcgacctgctggtcggcgccttgcaggagccgccgtcgctggacacgctggccagccgcgtgggcatgaacccgcgcaagctgaccgccggcttccgcaaggtgttcggcgccagcgtattcggctacctgcaggagtaccgcctgcgcgaggcgcaccggatgctctgcgacgaagaggcgaacgtctccacggtggcctaccgggtgggctacagcccggcgcatttctccatcgctttccgcaagcgctacggcatctcccccagcgagatccgctgagtctccgcgacgacccccgacccggccacgggaggggcgtcgccgctgcgggatgacgctgcatctaacgaaacagtccggctgtctaaagcattgccggccaggcctcccaggcaagtgagataaggtcgcatttgataatcgttgccaggaactggcaaccgacctcagatgcttgccctagggagcccccatggatctgccccccgattcccgtaccgccctgcgcgactggctgaccgagcagctcgccgacctgctcggcgaaccgcttgccgacgtgcgcgccctggcggacgacgacgacctgctgggctgcggcctcgactcgatccgcctgatgtacctgcaggaacgcctgcgcgcgcgtggctcgacgctggacttcgcccagttggcgcagcgcccctgcctgggggcctggctcgacctgctggcctgcgcggaccggctgtccgccccggcaacggtcgcgctgccggcggcgcaggatcgcgaccagccgttcgagctgtcttccgtgcagcaggcctactggctgggacgtggcgccggcgaggtgctgggcaacgtcagctgccatgccttcctggaattccgcgcgcgggatgtcgacccgcagcgcctggccgcggcggcggagtgcgtgcgtcaacgccacccgatgttgcgggcgcgcttcctcgacggtcgccagcagatccttccgacgccgccgctgtcctgcttcgacctgcaggactggcgcaccttgcaggtggacgaggccgagcgcgactggcaggcgctgcgcgactggcgcgcccatgaatgcctggcggtggagcgcggccaggtattcctgctcgggctggtgcgcatgccgggcggcgaggatcgcctctggttgagtctcgacctgcttgccgccgatgtcgaaagcctgcgcctgctgctggccgaactgggcgtcgcctacctggcgccggagcgcctggcggagccgccggcgctgcatttcgccgactacctggcgcgccgtgcggcgcaacgcgccgaggccgcggcgcgggcccgcgactactggctggaacgcctgccgcgcttgccggacgcgccggccctgccgttggcctgcgcgccggaaagcatccgccagccgcgcacccggcgcctggcattccagctttccgccggcgagagccggcgcctggagcgtcttgccgcgcagcatggcgtgaccttgtccagcgtgttcggctgcgccttcgcgctggtcctggcgcgctggagcgaaagcgcggaatttctcctcaacgtgccgttgttcgatcggcatgccgacgacccgcgtatcggcgaagtgatcgccgacttcaccaccctcttgctgctggagtgccggatgcaggccggggtgtccttcgccgaggcggtgaagagcttccagcgcaacctccacggagccatcgacgacgccgcattccccgccctggaggtgctccgcgaggcgcgccggcggggccagccgcgctcggcgccggtggtgttcgccagcaacctgggcgaggagggcttcgtcccggcggccttccgcgacgctttcggcgatctccacgacatgctctcgcagaccccgcaggtctggctcgaccaccagctctaccgggtgggcgacggtatcctgctggcctgggacagcgtcgtcggcctgttccccgaaggtctgccggaaaccatgttcgaagcctacgtggggctgctccagcgtctctgcgacagcgcctgggagcagcccgccgatctgccgttgccctgggcgcagcaggcgcgtcgggccctgctcaacggccagccggcatgcgccacggcgcgcaccctgcatcgcgacttcttccttcgcgccgccgaggcgccggatgccgacgcgctgctctatcgcgaccaacgtgtcacccgcggcgaactggccgagcgtgcgctgcgcatcgccggcggcctgcgcgaagccggggtgcgccctggcgacgcggtcgaggtcagcctgccgcgcggaccgcagcaggtcgcggcggtattcggcgtgctcgccgcaggcgcctgctacgtgccgctggacatcgaccagccgcccgcacggcggcgcctgatcgaagaggccgccggggtatgcctggcgatcaccgaggaggacgatccgcaggccttgccgccgcgcctggatgtccagcgcctgctgcgcggcccggcgctggccgcccccgtgccgctggcgccgcaggcgagtgcctatgtgatctacacctcgggctccaccggggtgcccaagggcgtcgaggtcagccacgcggcggcgatcaataccatcgacgcgctgctcgacctgctgcgggtgaacgcatcggatcgcttgctggcggtctccgcgctggacttcgatctgtcggtcttcgacctgttcggcggcctcggcgccggtgccagcctggtcctgccggcccaggaacaggcgcgcgatgccgctgcctgggcggaggctatccagcggcatgcggtgagcctgtggaactcggcgccggccttgctggagatggccctcagcctgccggcgagccaggccgactatcgcagtctgcgggcggtgctgctgtccggcgactgggtggccctggacctgcccggccgcctgcgcccacgttgtgccgaaggctgccgcctgcatgtgctgggtggcgctaccgaagcgggcatctggtcgaacctgcagagcgtcgatacggtgccgccgcactggcgttcgattccctacggccggccattgccgggacaggcctaccgggtggtcgacacccacgggcgcgacgtgccggacctggtggtcggtgagctgtggatcggcggcgccagcctggcccgcagctatcgcaacgatcccgaactcagcgcccggcgcttcgtccacgatgcccagggccgctggtatcgcaccggcgatcgcggtcgctactggggcgacggtaccctggaattcctcggtcgggtcgaccagcaggtgaaagtgcgcggccagcgcatcgagttgggcgaggtggaggccgcgctgtgcgcccaggctggcgtggagagcgcctgcgcggcggtgctcggcggtggcgtggcgagcctcggcgcggtgctggtaccgcgcctggcgccacgggccgaaggctccatggaactaccggccgcacagcccttcgccggcctggcagaggccgaggcggtactcacccgggaaatcctcggcgcgctgctggaggcgccgctggagctagacgacggtttgcgccggcgctggctggactggctagcggactccgccgccagcgcgctgccgtcgctcgacgaggcgttgcgccggctcggctggcaggccgcggggctgaccgcgatgggcaacgctctgcgcggcctgctcgccggcgaacaggcgccggccgcgctgctcctcgatccctggctggcgccgcaggcggtggccgcgcgcctgccggacggccgcgaggccctggcgcgcctgctcgaagcgctgccgacgccggctgccggcgaacgcctgcgggtggcggtgctggatacccgcgccgggctctggctcgaccagggcatggcctcgctgttgcgcccggggctggaactgaccctcttcgaacgcagccgcgtcctcctcgacgccgccgccacccgcttgccggaacggatcgtggtgcaggcgctggacgacggcctgctacctgccgagcacctcggtcgctacgaccgggtgatcagcttcgccgcgctgcacgcctacgaggccagccgcgaaggcctggcgctggcggcggcgctgctgcgcccgcagggccgcctgttgctggtggacctgctatgcgagtcgccactggcgctgctcggtgcggccttgctcgacgaccggccgctgcgcctggcggagttgccgagcctgctggccgatctcgccgctgcgggactggcgccgcgttgcctgtggcgcagcgaacggctcgccctggtcgaggcgctggcgccgggactagggctcgacgccgccgcgctccaggccggcctggagcaacgcctgccccaggcgatgcggcccgaacgcctgtggtgcctgccaagcctgccgttgaacggcaatggcaaggtcgatcgtcgccgcctggccgagagcatgacccgcgcactcggcgagtgtcgtcacgagccctcggcggaggagccgctggaagcccatgagcaagcgctggccgagtgctgggaagcggttctcaaacgcccggtgcgtcgtcgcgaggcgagcttcttcagcctcggcggcgacagcctgctggcgacccgcctgctggccggcatacgtgagcgtttcggcgtacgcctgggcatggccgacttctatcgccagccgaccctggccggtcttgcccgccacttgcaggcgcagaccgtcgaaatcgaggaaacccaactggaagagggcgtgctatgagcctcggcgaactgctggaaacctgccgcagccggcgcatcgaactctggagcgaggcgggccgcctgcgctatcgcgccccacagggcgccctcgacgccggcctcgccgagcgcctgcgggccgagcgcgaggccctgctggaacacctggaaggcggccctggctggcgcgccgaacccgacctggcccaccagcgcttcccattgaccccggtgcaggccgcctacgtgctgggccgccaggcggccttcgactacggcggtaacgcctgccagctgtacgccgagtacgactggccggtcgacaccgatccggcgcgcctggaggcggcctggaacgccatggtcgagcgccacccgatgctgcgcgcggtgatcgaggacaacgcctggcagcgcgtgctgcccgaggtgccctggcagcggctgaccgtgcatgcctgcgcggggctcgacgaggccgctttccaggcgcacctggagcgggtccgcgaacgcctcgaccacgcctgcgcggcactcgaccagtggccggtcctgcgccccgagctgagtatcggccgggatgcctgcgtactgcactgctcggtggatttcaccctggtcgactacgccagcctgcaattgctgcttggcgaatggcgccgccgctatctcgatccgcaatggacggcggaaccgctggaggcgaccttccgcgactatgtcggcgtcgagcagcgccgacgccagtcgccagcctggcagcgcgaccgcgactggtggctggcgcgtctcgacgcgctaccggggcgtcccgacctgccgctgcgggtgcagccggacacccggtccacgcgcttccggcacttccacgcgcgcctcgacgaggccgcctggcaggcgctcggcgcgcgcgccggcgaacacggcctgagcgctgccggcgtggccttggcggccttcgccgagaccatcggtcgctggagccaggcaccggcgttctgtctcaacctgacggtactcaaccggccgccgctgcatccgcagctggcgcaggtgctcggtgacttcaccgcgctcagcctgctggcagtggacagccgccacggcgacagtttcgtcgagcgtgcccgacgcatcggcgagcagatgttcgacgacctcgaccacccgaccttcagcggcgccgacctgctgcgcgaactggcgcgccggcgtggtcgcggcgccgatctgatgccggtggtgttcaccagtggcatcggcagtgtgcagcgcctgctcggcgatggcgaggcgccgcgcgcgccacgctacatgatcagccagaccccgcaggtctggctggactgccaggtcaccgaccagttcggcggcctggagatcggctgggacgtacgcctcgggttgttccccgagggccaggcggaagccatgttcgacgacttcgtcgggctgctccggcgcctggcgcagagcccgcgcgcctggaccgacggcgatgccacggaacccgtcgaggcgccgccgcaggcgttgcccggtagtgcccggagcatcgccgccggtttcgccgagcgtgccctgctgacccccgacgccacggtgatccacgatgccgccggcagctacagctaccgccaagtcgcccagcacgccagcgccctgcgccgcgtcctggaagcgcacggcgcgggccgtggccggcgggtcgcggtgatgctgccgaaaagcgccgcgcaattggtcgcggtgatcggcatcctccaggccggcgccgcctatgtgccggtagacatccgccagcctccgctgcggcgccaggcgatcctcgccagcgccgaagtggtcgcgctggtttgcctggaaagcgatgtcccggacgtcggctgcgcctgcgtggccatcgaccggctggccgccgacagcgcctggccgccaccgcccgcggcggaggtggcggcggacgacctcgcctacgtgatctacacctccggctccaccggcacgccaaagggcgtgatgctcagccatgcggcggtgagcaacacgctgctcgacatcaaccagcgctacggcgtcgacgccaacgaccgcgtcctcggcctcgccgagctgagcttcgacctctcggtctacgacttcttcggcgccaccgcggcgggggcccaggtggtcctcccggacccggcgcgcggcagcgatccatcgcactgggcggaactgctggaacgccacgccatcaccctgtggaactcggtgccggcccaaggccagatgctcatcgattacctggagagcgagccgcaacgtcacctgccgggaccgcgctgcgtgctctggtccggtgactggattccggtcagcctgccgacccgctggtggcggcgctggccggacagcgcgctgttcagcctgggcggcgccaccgaggcggcgatctggtcgatcgagcagccgatccgcccgcagcacaccgagctggccagcatcccttatggccgtgccctgcgcgggcagagcgtggaagtcctggatgcccgcgggcggcgctgcccgccgggcgtgcgcggcgagatccatatcggcggggtgggcctggcgctcggctacgccggcgatccgcagcgcaccgccgaacgcttcgtccgtcaccccgatggccgtcgcctgtatcgcaccggcgacctcggccgctatctggccgacggcagcatcgagttcctcggccgcgaggacgaccaggtgaagattcgcggccaccgcatcgaactggccgagctggacgccgcgctgtgcgcccatccgcaggtcaacctggcggccaccgtggtgctcggcgagacccacgagcgcagcctggccagcttcgtcaccctgcatgcgccggtggaggctggtgaggatccgcgtacggcgctcgacgcggtgcgccagcgggcggcccaggccttgcgccgcgactggggcagcgaggagggcatcgccgcggcggtggccgcactcgaccgtgcctgcctcgcctcgttggccgcctggctggccggcagcggtctgttcgccagtgcgacgccgctggacttcgccaccctgtgccagcgcctgggtatcgccgaggcgcgccagcgcctgctgcgccactggttgcgccaactggaggagggcggctacctgcgcgccgagggcgagggctggctgggctgcgccgagcgtcccgcgcagagtccggaggacgcctggacggcgttcgccggctgcgcgccggcggcgctctggccggccgagctggtcgcctacctgcgtgacagcgcgcaatccctcggcgagcaactggccgggcggatcagcccggcggcgctgatgttcccgcagggctcggcgcgcatcgccgaggccatgtacagccagggcctgcatgcccaggcgctgcacgaggccatggccgaggccatcgccgccatcgtcgagcgccagccgcaacggcgctggcgcctgctggagcttggcgccggcaccgccgccgccagccgtgcggtgatcgcccggttggcgccgctggtgcagcgaggggcggaggtggactacctgttcaccgacgtttccagctacttcctcgccgcagcccgcgagcgcttcgtcgaccagccgtgggtacgcttcggccgcttcgacatgaacggcgatcttctcgaccagggcgtggcgccgcactcggtggatatcctgctcagctccggggccttgaacaacgcgctggacaccccggcgctgctggccggcctgcgcgagttgctgagcgccgacgcctggctggtgatccaggaactgacgcgcgagcacaacgagatcagcgtcagccagagcctgatgatggagaacccgcgcgacctccgcgacgagcgccgccaactgttcgtccacaccgggcaatggctggagtggctggcggcacagggtggcgacctggcttgtggggtggtgccgccgggcagcgctctcgacctgcttggctacgatgtcctgctggctcgctgcaagaccgaccgcgcccgcctggagccggccgagctgctggccttcgtcgaagcgcgggtgccgcgctacatgctcccggcgcagttgcgcgtgctcgaacgcctgccggtcaccggcaacggcaagatcgaccgcaaggccctgaccggctttgcccgccagccccaggcggaccttcggcatggcgtcgcgcaggcaccggccgacgaactggagaatgcgctgctggcactctggcgggaggtgctggacaacccgtcgctgggcgtcgagcaagacttcttcggggctggcggcgactcgctgttgatcgcccagttgatcgcccgtttgcgcgaacgactggaaagcgcccgtcggcatccgttcgatcgcctgctacgctgggcgctcagccagccgacgccgcgcggcctggccgaacgcctgcgcagcgcgccggaagagggccgtgggccagccctggccgcggcgcgcggcgtcgccccggcgccggccggcatgtcgcgcgcaccgctcgccgagggcgcggtggcgctcgacccgctggtgcgcctggtgcccggcgagggcgtgccgcgggtgctggtccacgaaggcctcggcacgctgctgccgtaccgcccgctgcttcgcgccctgggtgaggggcggccgttgctggggctggccgtgcatgacagcgacgcctacctggcgatccccgccgagcatctcaacgcctgcctcggccgccgctacgccgaggtgctccatggcgccgggctgcgcgaggttgacctgctcggctactgctccggcgggctggtcgccctggagaccgccaagtccctggtccagcgcggggtgcgcgtgcgccagctggatatcgtctccagctaccggattccctaccgggtggacgacgagcgcctactgttgttcagcttcgccgcgaccctcggactggatactgcggcgctcggcttccccgcgccggaacgtctcggccaggcggtgcaggcggcgctcgcgcagacaccggagcgcctgggcgccgaggcgctggcggagctaccgggcctggccgatctcgtcgccctgcgcggccgcgtgctacaggcggccagcggtagcgccgacgccgccagcgtcgaacgcgacaccctctaccgactgttctgccactcggtgcgtgccagccaggccgcggcgccggagccctacgtcggcgcgctgcggctgttcgtgccggacgccggcaacccattggtgccgcgctacgccgaggccctggagacccaatggcgggccgccgcgcttggcgcgtgcggcatccacgaggtgcccggcgggcacttcgactgcctgggcgaagccctggcgcaatccttgtcgaaacccatgccaaaggaggcgagccgatgagcgacgtccgttccgtggtggtcgccggttcccggttcggccagttctatgccgccggcgtcgccgccgatccgcgcttcgtcctgcgcggcatccttggccagggcagccggcgttcgcgggcgttggccgagcgcctcggggtggagacctggtgcgaggtcgaggcgttgccggacgatgtccgcctggcctgcgtcgcggtcggcggcgcggcacgcggcgagcagggcccggcgctggccgaggcgctgatggcgcgtggcatcgacgtgctgatcgagcatccgttgctgccgcgcgaatggcaggacctgctgcgcagcgccgagcgcctgggccggcgctgcctgctcaacaccttctatccgcagttgccggcggtggcgcgtttcatcgagctgggccgccagttgcatcgccggcgcggcatccgccacctggacgcggcctgcggggtgcaggtcggtttcgccaccctggacatcctcgccgcgttgctggagggcgtcggcccctggtcgctggagtcgccctcgaacgacctgtcggcgatgcgcgggctgtccctggtgttggcggaagtgccgttgagcctgctcgtgctcaacgaactggcggccgccgacgacgggcgcatgaccttgttgcagcgcgtcagcctgaccaccgatcgcggcacgctgagcctgctcagcccccatggcccgttgttgtggacgcctgcggtggcggtaccggcagaggatgacgacggcctgttcgcgctgttcgacgagatagccggcgaaccgctgcccagcgcccagctctggtatgccgaaccgtgcaactgggcccaggtgcaccagcgcctgtggccggcggcggcggccgaggcgctggcgctgctcgccgacggcgacgaggtgcgtcggcgcaaccaacgcagcctggaggtcgccgccctgtggcagcggatcggcgagtgccttggcttccctgaggcgccgccggcgtcgctggcgccggcgagcctggaacaggtgctggagcaagcctcgtgaccccggtgctgtggcgcctgctgcgcacctatcgctggcggctggcggcggccatggggttgcaggccctggccgggctctgctcgctgttgccctggatgcttctcgcctggctcgtcgagccgctggcgcgcggccaggcgcagccggccctgctggccctggtgctgctggcggtgctggcctggctgggctgccaggcgctggccgcgcacctggcccaccgggtcgacgcggacctctgcaacgacctgcgcctgcgcctgctggcgcacctgcaacggctgccgctggactggttcggtcgccagggcccggacggcgtggcgcgcctcgtggagcaggacgtgcgggccctgcaccaactgatcgcgcacgctcccaacgatctcagcaacctgttggtggtgccgctcgtcgcgttgctctggctggcctggctgcacccctggctgctgctgttctgcctgctgccgctggtgctggccgccgccggcttcctgctgctgcgctcggcgcgctatcgcgacctggtgctgcggcgcaacgccgcgctggaaaggctctcggcggactatggcgaattcgcccacaacctgctgctggcccgacagtaccccggcgccggcatacaacagggcgccgaggcgtcggcggcggccttcggcgaagcgttcggcgcctgggtgaagcgggtcggccacctcgccgcgctggtctacgtgcagttgtcgacgccctggctgctggcctgggtcctgctcggcgcgctggccctggatgccctcggcgtgccgctggcgctcggccaggcctgtgccttcctgctcctgctgcgggccctggccgccccggtgcaggcgctcggccacggcggcgacgcgctactgggcgcgcgcgccgccgccgagcgcctgcagcaggtgttcgaccatgcgccgctggccgagggccgctcgacccgcgagccggtcgatggcgcggtggcgctgcacggcctgggccatgcctatgaaggcgtggaggtcctggccgatatcgatctggagctggaggatggcagcctggtggccctggtcggtccctcgggctccggcaagagcaccctgctgcacctgctggcgcgctacatggacgcgcagcgcggcgaactggaggttggcggcctggcactgaaggacatgcccgatgccgtgcgccaccggcatatcgcgctggtcggccagcaggcggcggcgctggagatatccctggccgacaacatcgccctgttccgccccgatgccgatctccaggagattcgccaggcggcccgtgacgcctgcctcgacaagcgcatcatggccctgccgcgtggctacgacagcgtgccgggacgcgacctgcaactgtccggcggcgaactgcaacgactggccctggcccgtgcgctgctatcgccggcgcgcctgttgctgctcgacgagccaacctcggcgctggatccgcagaccgcccggcaggtcctgcgcaacctgcgcgaacgcggcggtggccggacccgggtgatcgtcgcccatcgtctggccgaagtcagcgatgccgacctgatcctggtgctggtcgctggccgtctggtcgaacgcggcgagcacgcggcgctgttggcggcggacggcgcctatgcgcgcttgtggcgtgaacagaacggcgtggaggtggcggcatgaccctgttcgaacgaatgcgtgcgctgcccgaagactgccgtgccgcgttgcgccgggcgagcgcctgggcggtcctggcggcgctgctggacgccgcttgcggcgtattgctggtgccgttggtcgaggcctggttcgccgaaggcgcgttgccctggcgctgggtcgccgcgttgctcggcttgagcctggcgcaggcgctgttgcagtacctggccctgcgtcgcggtttcgccgccggcggctcgctggcggctggactggtgcgcagcctggtggcgcgcttgccgcgcctggcgccgccggcgctgcgccgggtcgcgccggccgaaggcctgctgcgcggcccggtgatgcaggcgatgggcattccggcgcacctgctggggccgctgatcgccgcgttggtgacgccgctcggggtgatcctcgggctgttcctgatcgacccgtccatcgccctcggcctgctccttgctggtgccttcctcgccgcgctgttgcgctggagcgggcggcgcaatctggcggcggaggatgcccggctggccgccgagcgcgacgccgcacggcagttgcaggcgttcgccgaacgccagccactgctgcgcgcggcgcagcgcgaaagcgtcgcccgccaggggctggaagaggccttgcgcagtctccaccgcagcaccctggaactgttgcggcgcagcctgcccagcggcctcggcttcgccctggcggtgcaggcggcgttcgccttcgccctgctcggcggcgcctgggcggtggagcggcaatggctggacggcgcgcgactggtggccgtgctggtgctgctggtgcgcttcatcgagccgctggcccagctcacccatctcgaccaggcgttgcgcggcgcctggcaggcgctggacaccctgctgcgggttttcgccctggctccgctgcgcagccccgagccgggcgagcggccgcacgacgccagcctggcggccgaggccgtggaattgcgcctggaagatggccgcgccttgctcgaggacatttccctgaggctggagccgggttcgctgaacgtcctcgtcggaccctccggggccggcaagagcagcctgctggcgctgctcgggcggctctacgacgtcgatgccgggcgtgtcctgctgggtggcgtggatatccgccggttgagcgaaacgaccctcgccgccaatcgtaacctggtgttccaggacaacggcctgttccgcggcagcgttgcctggaacctgcgcatggcgcgagcggacgccgatctcgaagcgctgcgcgaggcggcgcgggcggttggcctgctggaagagatcgaggcctggccgcagggctgggacagcgatgtcggccccggcggcgcgctgctgtccggcggccagcggcaacgcctgtgcctggctcgcgggctgctctcggcagcgccgttgctgctgctcgacgagcccaccgccagcctcgatgcagccagcgaggcgcaggtgctgcgcagcctgctcgggttgcgcggccggcgcaccctgctggtagtgacccaccgcccggcgctggcgcgtcaggccgaccaggtactgctgctggagaaggggcggctgcgcctgagtggacgtcacgccgatctgctcgtccgggacgactggtatgccggcttcgtcgggctggcgggcgaggaaagttccgcgacggccgtggatcgatagagaaagaccggcaatcgaaaaagccccggagatgatttcttcataatgataagcattatcaaatcgtatatcccccgaggctgttcgaacgatgaaaacggagacgaaggtgatcaagggacgccagggcatcgcccgcaatcggcacaccccgttgtgcctgggcctgctgctggcgctgagtccgctggccgcggccgtggccgacgcgcgcaaggacggcgagacggaactgccggacatggtgatcagcggagaaagcacgtctgccacccagccgccgggggtgactaccctgggcaaggtgccgctcaagccgcgcgagctgccgcagtccgccagcgtcatcgaccatgagcgcctcgaacagcagaatctgttcagcctcgacgaagccatgcagcaggccaccggggtcaccgtgcagccgttccagctgctgaccaccgcctactacgtgcgcggcttcaaggtcgactccttcgagctggacggggtgccggcgctgcttggcaatactgccagttcgccgcaggacatggcgatctacgagcgggtcgagatccttcgcggctccaacggactgctgcatggcaccggcaacccggcggccaccgtcaacctggtgcgcaagcggccgcagcgcgaattcgccgccagcaccaccctcagcgccgggcgctgggaccgctaccgcgccgaggtcgacgtcggcggcccgctgagcgccagcggcaacgtgcgcggccgagcggtggccgcctacgaggaccgcgactacttctacgacgtggccgaccagggcacccgcctgctctacggggtgaccgagttcgacctgagccccgacaccctgctcaccgtcggtgcgcaataccagcacatcgactcgatcaccaacatggccggggtaccgatggccaaggatgggtccaatctcggactgtcccgcgacacctacctcgatgtcgactgggaccgcttcaagtgggacacctaccgcgccttcggctccctcgaacagcaactgggcggcggctggaaaggcaaggtcagcgccgaataccaggaagccgattcgcgcctgcgttacgccggctccttcggcgccatcgacccgcagaccggcgacggtggccagctgacgggcgccgcctacaagttcaagagcatccagcgcagcctcgacgccaacctcaatgggccggtgcgactgttcggcctgacccacgaactgctcggtggggtcacctacgcccagggcgagacccgccaggacaccgcacgcttcctcaacctgccgaacaccccggtcaatgtctaccgctgggacccgcacggcgtgccgcgcccgcagatcggccagtacacttcgccgggcaccaccaccaccacccagaaaggcctctatgccctgggtcggatcaagctcgccgagccgctgaccctggtggtcggcggccgcgaaagctggtgggaccaggacaccccggccacccgcttcaagcccggtcgccagttcacgccctacggcgggctgatctgggacttcgccagggactggtcgtggtatgtcagctacgccgaggtctaccagccgcaggcggatcgccagacctggaacagcgagccgttgagcccggtggaaggcaagacctacgaaaccgggatcaagggcgaactggccgacggccgcctgaacctgtcgctggcggcgttccgcatcgacctggagaacaatccgcaggaagacccggaccatccggggccgcccaacaatccgttctacatcagcggcggcaaggtgcgcagccagggcttcgagctggaaggcaccggctacctgacgccctactggagtctctcggccggctacacctacaccagcaccgagtacctcaaggacagccagaacgactcggggacgcgctactccaccttcaccccgaggcacctgctgcgcctgtggagcaactacgacctgccctggcaggaccggcgctggagcgtcggcggcggactccaggcgcagagcgactacagcgtcgactaccgcggcgtgagcatgcgccagggcggctacgcactggtcaacatgcgcctgggctacaagatcgacgagcactggacggcggcggtcaacgtcaacaacctgttcgaccggacctactaccagagcctgtccaaccccaactggaacaaccgctacggcgaaccgcgcagcttcaacgtcagcctgcggggcgcgttctgatgccgcgccagtcgggcttcggctgggcctggcgggttccgctggcgctcgccggcagcctggcggcggcgaccgccagcggctatctgttgactcgcgggctgcccctggacgacccgctcgagcgtctctacgccgggctcttcggcgcgctcggggtgggcttgttgctgcttgtcggcgggttgctggcgcgtgatccgggcaacttcgcctggcgcctgggcggtagcctgctggcactgggcctggcgttgtggctgctggcggggcgcggttgaagtggcggcgcgtcctctcctgctctcgctgcacggtggcgccggcgcgctgttcggcgtgctgctgttcgtggtgctgttcagtggcgcctggagtcttggccacgacgacctgcgcgagtggctgcgggccccggcgcaggcgggaggagaagcccttgcgctggagcgcctgctcgaacgggcgggcgaggaaggcgtcgacatccgcgatgcgaccctgctgctgcctgctcccggccatgccgccttcagcgtctgcgatgcgcgcctggactgccggctggacctcgacccggccagcggccgggtgctgccaccgacgccggcgctggacctcctgctgaacctgcacaagagcctgttcgtcggcttccccgggcgggtgctggtcagcctgttcggcgtatcgctgttgctgctgtgcctggccggcgtgctgctgcacagccgccgctggcgcgacctgcggcgttggcggcgggaccgcgggctgcgcctggcgctgttcgacctgcacggcctgatcggcatctggggactgccctggctgctgttgttcggtttcaccggcgcgctcagcgggctgggcgcgctcgggaccctgctgctggcgccggtggcctacccgcaggaaccgaaccgggtgttcgtcgagttgatgggaccgccgccgcccgccgccgaggggcggccattggcgtcccgcatcgatctcgaccgcctgcttgccggcgatgccgtgcgggcgcccggcttcgtcgcccagcgcttgagcctcagtcatgccggggatgtcgccggcagcgtggagatcgccggtatccagcgtggcctgccgagtaccgcgaacttcgagcggcaccgctatcggctggccgacggcgccctgctcggcgagcgcagctcggcgcagcgcgggttctggctgcgcgccttcatcgccgtgcagccgttgcatttcgcccagtaccagtggctcgggccgggctggtccgccgcgttgcgcggcctgcacctggcgatgggcctcggcgcctgcctgctctgcgccagcggcctgtacctgtggctgcaacgacgcgcctcggcgccggacgcccgcgtacggctcttgcagcgcctgagccagggtttctgtgccggcctggtggcggcggccgcgttgctcctgctggggctgcaactcgtgccctcggagctactcgccggaccctggccggggcggctgttccttgtcctgtgggccgccgctggcctggcggcgttgctgctgccgggcgactggccgctggcgcgcgggttgctcggcgtcgccgggctggcctgcctggcggccgccgtcgcgcacctggcgccctggctcatgcgcggccggctgccggccctgggccccgacctcaccctgatcctctgcggcgcgctgctcatccggcacgcctggatgcaggcgcgcgccgccgcgccacccgcccacccccgtgtcaccggagaccaccatgcttgagctgtatcgccaccgccgcctggtcatcaccctggcgttgctctacctgtcccagggcattcccatcggcctggccatggacgccctgcccaccctcctgcgccaggatggcgcgccattgcaggcgctggccttcctgcccctggtggggctgccctgggtggtcaagttcctctgggcgccctgggtcgacaaccattggtcgcgccgtctcggccggcggcgtagctggatcctgccgatgcaatgcatggtcctcgcctgcctgctcggcctggcgacgctcggcctcggcgtggccagtgccggttgggcggtcggcctgctggcgctggcttcgctggccagcgcgacccaggacatcgccaccgacggcatggcggcggagcacttcagcggcgagctgctggccaaggtcaacgcggtacagatcgccggggtgatgatcggcttcttcggcggcggtgccggcagcctgatcctcgccgggcatttcggccagcgcgcggcgttcctggtcgtggcctgcgtgccgctggcaagcctgtgctgcgtgctcgccctggggcgcggcgacccccacgaactccccccggcaccggccgccaaggccagcctgctgcgcttcctgcgtcggccgctggcgccttcgctgctggcgctggcactgctgtcggcgatgaccgcggtatccggcttcggcctgtccaagctgtacctcagcgatgccggctgggccttgcaggacatcggccggctgggcatgagcggtggcctggtcacggtattcctcggctgcggcggcggcgcctggctggtcaggcggatcggcctgtggcgcggtttcgcccttggcgtggtgctcgccggttgttcggcgctgctctggtatctgcaggccggtcgctggttggcactgagcgaaggattggcgtggacctgcgtgctgatcggctcgctggctaccggcatcacctcggtggcgatcctcaccgcggcgatgcgcttcgccggccagggcggccaggccggcaccgatgtcaccgcggtgcagagcacccgagacctcggtgagatgctggcgtcttcgttcctggtcagcctcaccgcgcagatcggctatgccggcggcttcctcaccggcagcgccctggcggtgctggccctgttgctcgccctgcgcctgcaggccggcgaggggcgcggggagtggaaggggcgggcggaagaggcctgaggcgctgccgataggcgcgcagcgcccggcacccgcacggatgcctcctctcccgcggacgggagaggcgggagagggcaggcgcggtggcctgcccggtgttgctagcgtggccgttccacctggttgcggtagctgccggtgatcgcttccagcgccgcgctcttctcggtcttcggtcgcgaagccgcggcccattcctctttttcccgttcgcggttggccaggatgatcttgttggcggtcggccgccgcgcttcttcgtattcgcgcagggctgcggccacgtcggcgttgcgcgccagcgcggcggccagctcgatgccgtcgaggatcgcctgcgaagcgccgttggcgcccatcggatacatcaggtgggcggcgtcgccgagcagcgtgatgcgtccccggccccagtgcggcagcggatcgcggtcgaccatcgggtactgcaggatcaactggttgcgggtcagcaggtcgcggatgtcgaaccagcccaggtcccagtcggcgaagaacggcaacacgtcttccaggcgtccgttgcggttccagtcggcctcgttgtcgagctggccgacggcggcgctcggcaccatgcacacccagttcaccagcgacttgccttcggccgcgtggcgcgccgagatcggataggcgaccaggcgcgaccagtgctcgtcgttggcgacgatcatggtcttgccgtcgaggaagcggtcgaactcggtgacgccgcgccacatggtgatcccaccgtgggacagcggcccctggtcgggatgcaggtgcgcgcggaccgccgaatggatgccgtcggcgccgaccagcacatcggcaccgagcgcctggggcttgccgtgtccgtcgcgggcgccgatcagcacgcggccgtcgcgctcctcgatacgctccacgccgagaccggtgcgtaccgcctgttggccgaggcgctcgcgcaccgcggcgagcaggatcatctgcagttcgccgcgatggatcgagtactgcggataggcgttgccggcttccaccccgcgcggctcggaccataccgtggcgccgctctggtcgatgtagcgcagctcgtgggtggggatggcggtggccgccagcgccgggccgaggcccagttcggcaagggcctcgaccgccgccggctggatattgatgccgacgccaagggggcgtatctcgctgctgctttccagcagcgtgaccttgccgatgccggcctggtgcagggccagggcgcaactgaggccgccgatgccggcgccggcgatgaggatatcgatgggttcgctcatgggtgcttccttttctcgagtgttcgaatcgatgggggttcggctgggatggatgaccgtttaccgcgatgaaacgccggcgcagcggcggataacgccggtggcgtcattcgccctacgaaccggctccgaggccgcggtacgcatgaccgcgtgcggttagatgggctccaaggccgcgtagggcgaataaccgcttgcggttatccgccatgaaacgccggcgcagcggtgtcgtcacggttgcaggtagcggtgcttccagcctccttcgtcgcggtcgtagcgcaggcgctcgtgcagccgctcggtgccgttgccccagaactccaccgactccaggcacagttcgaacaggcagtagcccggcgggcgcggcagcgggccgtcggtttccgccaggcgccgggcttcggcgcgcagggcgtggatgtcggcgagggtttcgctctgccgcgaggcgatcgacatcgggtgggtctggtacgggcggttcagccactgggcgtcggcgcgctcgtcgggcaggcgttcggcgcggccgttgaggatgatctgctggctgctctcgcgccagtacagcacccccgaggcccaggggttctgcgccagttcgcggcccttctggctatcggcgtgggtggcgaacaccaccccgcgctcgcccagctcggcgatcaccacgatccgcgtcgacggccggccctgcccgtcgaccgtggccagggccagtgcccgcggctcgcgcacgccatagcggcgggcgcgttccagccagttgcgcagcacctccatggggttcgccggcggcgcctcgaactccgggaaaggggcttcgatggtcccggtgagggactcggaaatgttcgcgttgacgcccatcacggcgttcctccgttctgcccgttcacaggtaggcccggccttcggcgaaggccgcgccgttgcccgacacttccaccgtcgagacccgctcgccggcgccctcggcgcgggcgtacatgcgcgacggccggccgatctcgacgccctggaggatctcgatctgctgcccgtagggaatctgccggtggcgcgccaggtggatcgccagcggcccggcggcggaaccggtggcggcgtcctcgaccacgccgtaggccggcgagaacatgcggctgcgccagtgccgcccggcgccggcgaagcagttcaccgccaggtccgggaagtcgcacagcgcgcggtggtcggggtgcagcgcggacagcgcggcgacgctctccaggccgacgaacacgtggcgcgggccgttgcggtagacctcgatgggaaaggtcgagcccttcaggccgagggcggcgagcagctcggccggtcggctgaagtgctcccaggtggggatcggctgctgcatgctgcaggccaccaccttgccgtcctggcgctccagggcgaagggcacggtgcccatcctggtctccaggaacagcctgtccttgtcggtctcggcgcccagggcgatggcggtgcccagcagcgggtggccggcgaacggcagttcgttgaccggggtgaagatgcggatgcgcgcgtcgccgtcctgttgcgggcggagcacgaaggtgctctccgacaggttcatctcccgcgccatgcgctgcatgcgctcgccgctgaggtcgtcgcagtcgaagaacaccgccaccgggttgccttgcagcggttcgctggcgaaggcgtctatcacgacatatctgtgcatgggctctcctggctcagggccgccgctcgaccagcgcgtggcgcagcaggtcggcgatgatgcgcggaccctcgcgggtcagcaccgattcggggtggaattgcatggaggcgaagcgcggcccgcgcagggcatggacctcgccggtctcgcggtcgcggctgatctcgatcgggccgacctcgggaatctcgatgcggtcctgcagggcgcgcgcggcgaaggtgttgtagaagccgacgcgctcggcggcgccgaacaggtcgatctgtttctgcacgccctggttgggctcctgccggcgttgcaggtccaggcccaggcacaggctcagcacctggtggctcaggcacacggcgaggaacggccggcgctcgctgagcagcgaacggatggccaggtgcaggtggccgatcttcggctggccgatctcggtggggttgcccgggccggggcccatgatcaccaggtcgtagccgtcgaacgagtacggctcctggaagccgcgcacggtcaccgtcaggcccagcgacttgagctgcttggcgatcatcgaggtgaaggtgtcctcggcatcgacgatcagcacctcgcgtccggacaggtcggcctgcaactgctggcgctcgctggcgccgcgcagccagaagtcggcgatcggcgcgttgcggctggccagcgccgccaccacgtgcgggtgcgagcccaggcgctgcggcgcctgactcttcagcgcggcgatcagcccggaagccttggcccggctttccgccgcctcgcccaggggatcggagtgacgcacgatggtcgagccgacgccgatgcgcaggcggccgtcgccctcgatctcggcggtgcggatcaggatcgccgagtccagcgtgcgcccgccctggccgtcaccgccgatcagcgccgccaccccgctgtagtagccgcgaccctgcggctcgtagcggcggatcacccggcaggcgctttccagcgggctgccggtgacggtcggggcgaacagcgtctcgcgcagcacctcgcgcacgtcgcggctggtctggccctcgatgaagtactcggtgtgcgccaggtgcgccatctccttgaggtagggaccgagcacccggccgccgtcctcgcagatccgcgccatcatcttcagctcctcgtccaccaccatgtacagctcgtcggcttccttgcggttgtcgaggaattccatgacctcggccaggttcggcccggccggcgggtagcggtaggtgccgctgatcgggttcatcaccgccaggccgtcgcgcacgctgatgtgtcgctcgggcgaggcgccgaccagggtgcgttcgccggtgtggacgatgaaggtccagtaggcgcccttctcgcgcagcagcaactggcggaagaagctcagcgcgctggccgtggcgtagccgtcgatgcgcgcctggaagcgccgcttgatcacgaagttggcgccttcgccgcgaccgatctcgtcggcgatgacccgcccgaccacttcggcgtaggcctcgtcgtcgaggtcgaaagcttcctcgctcagttccagcgcctggttcggcagcagcgccagggcctgctccagcggcagcagttcctgctccaggaccttcagcgccagcagcggcgtgccgtcgtcgagcgcctcgaagccgcgctcggcgatctgccggtagggaatcagcgccagcaggtcatggcgcggcaggcccgggccgggctcgtccagcggcaggtcggccaggccgtgcagttcgagcgcctcgccgcggatcacgtcgagcaggcccgggccattgctttccgggcggtagagcaaggcgaacggcgccggccgttcgagcaggcgctgcaacagcgatgtgggcagggcgttcattccagcacctcgtcggtggtgaccaccatcgcgcagcggctggcggcgtattccagggccatgcggtggtgcgcctcgctgaagtcggcgatggcgtcggccaccaggaacggctggatgtcgttggagtaggcgtcgactgtggagatcagcaccccgacgtgggcgtatacgccgcacagcaccaactggtcgcggccggcggcgcgcatccgctggagcaggtcggagtggaagaaggcgctgtagcgccacttggtcagcagccagtcgtccggccccggcgccagctcctcgaccacctcgcggtcggccggactggcgcgcatgcccggcccccagaagtccttgagcagaccgcgctgctcctcggtcatgctgcccggctgggcggtgtaggcgatctgcacgccctgctcgacgcaccagcggcgcagccgcgcggcgttggccaccagcccggcgcgcaggctctcgggcagcgggcgtaggaagtagcgctgcatgtcgtgcaccagcagcaccgcgcgccgcggctccaggctccagcgcgccaggttggccggcaactgctgggcggtcggcaagggataggcggtgatttcgggaatgccgctcatgccacggtctccagggggaaggttgcgctcgggatcgcttctgcgccggaccaggccatcaccgcgctgagcgcctgccaggggttcagccgcggatcgcagaggctggtgtagtgccggctgacctggtgcaggccgctggaatcggcgacgcactcggtgacgtcgtccggggtggtctccaggtgcagcccggcggccacgccgccggagccggacaccgccaggcggaacgccgccacctcctcggcgatgctgcgcaccaggcgggtcttgttgccgcagggcgcgacgatggtgttgccgtgcatcgggtcgctcagccagatcaccgggtgcccggccgcgcgcaccgcctccaccagcggcggcaggcgctcgccgaccttctgcgcgcccatccgcgcgatcagcgtcaggcgtcccggctcgcggcgcgggtcgaggcgctcgcagagcgccagcaactggtcgcggccgatctccgggccgaccttgcaggccaccgggttgagcacctcggccagcagcgccacatgggcgccgtcgacctggcgggtgcgctcgccgatccacggccagtgggtcgaaccgagatagacccggcgctgctcgtcctcgcgcagcatcgacagctcgtagtcgagcagcagcatctcgtggctggtccagaccggcgaggcattcgcctcctgcccggacgcggcgtcccagcccaggtggcgcatgatgttgcgcgccgccgcgtagcccttgaggatccgctgcggatcggcccggcgctgctcggcatgggcctcgcggccgttgaccatgtcgccgcgatagaccggcagggtctgctcgccgacctgctcgtgcggcttggaacgcggcttggcgtactgcccggcgatgcgcccgacgcggatcaccggccgccggccggccaggcgcagggcgccggccagcagttccagcacggcggccttgcgcgccacgttctcggcatggtggtcgtccatgtcctcggcgcagtcgccgcactgcaccaccagcgcctcgccgcgggcgacccgcgccagggtcgcgcgcagggccaggatgtcgccggcgcggatcagcgccggactgccgcgcaggtacgcctgcacgtcgcgcaggcgcgacggatcgccccattcgggttgctgcagcgcttcgcagcgccgtacgcgttgcaatagatcgtccatggtgggtcccccttcggcaggagatatcgtttcgatcaagtgggaatgccttcgcgttttatttccgggaccggaatgctcaaggcgcgcaattgctggaagacgttcatgaattcgcggttgcgcttgatcttgccgtcttcaagttcgaaggaatgcaggaagtggttttcgtaataaccttcgggatatccggggaaaagaatcttgccgtgaccgtcgcattcgacccagaaatgattggggtcgtcggttccgaatatatttatgttgtaccactcccaatcgggaaagcacttcaatgaccagacggcatgttccgcaagtttgtctttgccacgaatgacgatgggcgagccggtatcggtggtccataaaccaccacagccgtcctcgacgaaaagttcatggcggcgcaggcgatcctggcctttggtattcatgtacttctcgacggtggcgcgattcttttcgcgaagttcgttggcatcggtgaaaccgattggatttgtcgtatcaggcatcgtcaatgctccttggcggtagatgtcattcaagtgggaataccgtcacgttttatttgcggaacggctattcccaatgcatgcagtttctgtatcgggttcatgaactcgcgattacgttttatccggccgttctcgagttcgaaggaatggatgtagtggttctcgcaatagccctccggataccccgggaccagcgccttgccgcgcccgtcgcactcgacccagaagtggttcggatcctcggtctcgaagatccgcacgttgtgccactcccagtcggggaagcagcgctcgagccactcggcgagccgcctgaggctctcatggccccggaaaaccaggggttcgccgctttccgtggtccagttgccggcgcagccgtcctcgacgaacaggctgtgccgctgtaaccgttcggcccccttcattgccatgtagcgctccaccgtggcgcgattcaggcgccgcagacgctcgatgtcgaggggtgtttccctgtaccgctgaccgttcatgcgccgcctccgagagggctctccaggtatgccggagaaacttttccctcgcggcatcggttattcgctggcgcgcaggagttcgtcgctcggtaagggagcgatattcgctgggcgcattgtttatacgtagggtgaaatttcgcgttacatatgttcgcctgtcgtttccaattttcgaaaggcaataggagtttcatcccgggtttcttttggaaacctgtcggtaatggattcgcaatgctttcgttaaggtgcgacagacgaggtcgcgaagactttcagcgtcattccgtgaagtgtttcaaatagccagcatccctggtcgctgatgtggattgcataaaacacagaacgctcgtaccggctcaactacaagatctggtaggtgccagacagggtatgcgggattgctaagctgatgcttcctgcaatgccggaggttgtagccaagttgtaattttattctttcggtacgcaggaaaaggctctggaacaggcagttggaaagttccagggttgtttccgcaacgagatccagggagcgctgatccgggggatgagcgcattttttctcaaagttccgaatgaaccggggtgttctgcggtatttctcgccgagcgggcaagaagtgcgaaatagagcgcttgggtacttctcgggttacggaaatgtgtaacgagagagaataaaagatgaataattcgaatcttgctgctgcgcgtaatttgatacaagttgttaccggggaatggaagtcccgttgcgtctacgtcgctacgcgcctcgggctggccgatctgatcgagagcgggatcgacagcgacgagacgctggccgccgcggtcggttccgatgccgagcgcatccatcgactgatgcgcctgctggtggccttcgagatcttccagggcgatacccgcgacggctacgccaatacccccaccagccacctgctgagggatgtcgagggctccttccgcgacatggtgctgttctacggcgaggagttccacgccgcctggacgcccgcctgcgaggcgctgctcagcggtaccccaggcttcgagctggcgttcggcgaagacttctacagctacctgaagcgctgcccggatgccggccggcgcttcctgctggcgatgaaggcgagcaacctggcattccacgagatccccaggctcctggatttccgcgggcgtagcttcgtcgacgtcggtggcggttccggcgaattgaccaaggccatcctgcaggccgagcccagcgcccggggcgtgatgctcgaccgcgagggttccctcggcgtggcccgcgacaacctttccagcctgttggcaggggagcgcgtcagcctggtgggcggcgacatgctgcaagaggtgccgtccaacggcgatatctacctgctgtcgcggatcatcggcgatctggacgaagccgccagcctgcggttgctcggcaattgccgcgaggcgatggccggcgacggccgggtggtggtgatcgagcggaccatctcggccagcgagccgtcgccgatgtcggtgctctgggacgtgcacctgttcatggcctgcgctggccgtcaccgcaccaccgaggaggtggtcgacctgctcgggcgcggcggcttcgcggtggagcggatcgtcgacctgccgatggaaacccgcatgatcgtcgctgccagggcctgaatcggaactttcaacggttggccccggcggtttcgccggcggccagttggccggcgcccggcgccaggtcgccgctgccccagccgagcgccttgtagagcgcgatgacgttgacgaacgaggcggtctccgcctgcgccagttcctcgcggatctggtacagcgcgcgctggttctccagcaccgccaggtagctgccggcgccggcgcggtagcgttcgttggcgatctccagggcgttcgcgccatgggtcgcggactggagcagggcgaccagccgacgctggtgttcggccagttggttgagcgcgttgccgacgtcctcctgggccagcagcagggagcgctggtagcgcgccagcgcggcgtcggactgcgcctcgacggcgcgcaggcgggcccgcacgttgcccaggcggaacgccggccaactgacgctgggcgccagttcgaaggcgcgcgaggcgctgccgaggtcgccgctgcgcagggcgaagaaaccgatgaagccgcccaggtcgaggcgcggatagagttcggcggtggccgcgccgacgtcttcggtgctcgctgccagttgccgctcggcgctgactacgtcggggcgctggaggatcaggcggtcgacgtcgcccagcggcaggttcttcgccaatggcgcggcggcgccgccgtcgaggatcggcgcgccgctgccgggtgcctcgccgcgcagcacgtcgaggcgatagcgggcgctctccagcgcggtcgtcagtggcggaatcgccgcttcgctgcgcagcaggttggcctgggcgttctccacgtcctccggcaggccgctgcccagttgcaggctgctgcgggtcagctccagggtgtcgcgccaactgcgcacctgggcgcgcgccacgtccagccggcgctggtagccctggatctcgaagtaggcgcgggcggtgtcggcggcgatgctcaggcgtaccagccggaggtcggcgtcggccgcttcggcgcgggccaaggcggcgtcggaaagtcggccgaggcggccgaacaggtcgatttcccactgcgcgtcgaagccggcgcggtagctctccgccaggcgccggcgcggctcgccgtcgtagtccagctgttgttcgatgctgcggctgtagccggcctggctggtgacctgcggcaactggtcgagccagcggtcgtcgaacagcgcgcgggcgctgcgcaggttggcgcgggcctcgcggatgtcgtggttgcgcgccagcgcctggtcgaccaggcgcaccagttgcggatcgtcgaagaaactccaccagggcgcttcccgccgctcgccggagaactcgccgaggtgctcgctggcgacgcgtggcggcggcgactgcggacgctggtagtcggggccgacgctgcaggcggccaggccggtgccgaccgccagggccagcgccaggcgcgaaaggttcgggtaggagcgcttcatgccttgttcaccagcagatcggcctcggccagttgccggctgcgcgggctcttgtcgacttccgcgtggttgcgcgccagcagggtatagacggtgggcagcacgaacagggtgaagagggtgccgaccagcatcccggagacgatcaccacgcccaggccgaagcggctggcggcgccggcgccgctggcgaagagcagcggcaccaggccgaagaccattgccgcggtggtcatcagcaccggccgcaggcggatctgcgcggcgcgcaggatcgccgcgcggcggtcgaggcgctcgtggagttgcagttcgttggcgaactcgaccatgaggatgccgtgcttgctgatcaggccgatcagggtgaccaggccgatctgcgtatagatgttcatcgtcgcgtagcccagcgccagcggcagcagcgcgccgcagatcgacagcggcacggtgatcaggatgatcagcgggtcggccaggctctcgtactgcgcggcgagcaccaggtagatcaccaccagggcggcgaggaaggcgaacaccagggtgttgccttcctgggtgtattgccgcgagtcggattgccagtcgtggctgaagccggccggcaggccgcgcgccacgtcgtcgaggaaggccaccgcctggcccatggagacgccgggcgcggggatcgcctggagggtcgcggcgttctgctggtcgaactggatcagcttgttcggttcgacctgaagcgccacccggaccaccgtcgacagcggcaccaggttgccgtcctgggtgcgcacgaactgtcgtgccagcgcttgcggagtgaaacgctggtcgcgcaggctctgtgggatcacgtcgtaggagcggccctccatgccgaagcggttgacgtagttctcgcccaccagcaccgccagcgactcgccgacgtcctgcatgcggatgcccaggctgttggccttggcgcggtcgatgcggacctggaccaccgggttgttgtagtcgaggtcgctgtcgaccaccacgaacagcccgctctgtcgggccttctgcttgatctcttccatggtccggtagagcaccgggtagtcctgcgggctgcgcagcaccatctgcaccggcaggccgccggtggagccgggcagggcggccaactggaaggcgaagatgctgctgccctcgacatcgccgaccttgccttgcagctcggactggatcgccgaggcgtcgcgctcgcgtttttcccaggccgccaggttgatcccgccgaagctcgccgccggtccgtcggtgccgttgatgatccaggtgctgacggtttccgggatgctggtgtagacctggtcgagcttgcgcgcgaacagttcgacatagtcgaggttggcgtgctgcggcgccttgatcgcggtgagcaccgcggcctggtcctcggtcggcgccagttcgcgcttgggcatcgaatacagcagcggcaggctgatgcacaccagcaatgccaggccgccggtcagccagcggtggcccagggagaactccaggacctgcccgtagcgccgcgtcaggccgccgaagaaccactcggcggcgcggcccatgcgcccctcgttctggtgcgcctggagcagcagcgaactcatcaccggcgacagggtcagcgccaccaccccggacacgatcaccgcgcccgccagggtcagggcgaactcgcggaacagcgcgccggtgaggccgcccatcaggccgatgggggtgtacacggcggccagggtgatggtcatggcgatcaccgggccggccacttcgcgggcgccgatcagcgccgccgccaccggcgacttgccttcctcgatgtggcggtggacgttctccaccaccacgatggcgtcgtccaccaccagcccgatggccagcaccatcgccagcagggtcagcaggttgacgctgaagccgaaggccagcatcagcgcggcggcgccgagcatcgacaggggaatggtcgccaccgggatcagcacgctgcgcagcgagccgaggcagaggtagatcaccagcaccacgatcagcagcgcttccaccagggtccgcaccacctcgtcgatggaggcctggatgaagcgcgaagtctcgtaggcgaggtcgacgcggacatccggcggcagggtcttctggatctccggcagcagcttgcggatgccgtcgacgatcaccagcgggttgccggtgggcgtcgggaacaaccccaggtgcaccgccgggtcgccgtccatcagtgcgctggtctcggtggccgcggcgcccagttcgacggtaccgacgtcgcgcaggcgcaccaggccgttgccatcgttgcggatgaccatctcgcggaagtcgtcgacgttggtcaggtcggtgttgacccgcacgttggacagcacgtactgccccttcaccatccccggcgccgcctggtagttgttgcggcggatcgcctcggccacgtcggaggcggtcaggccgcgcccggcgaggcggtcggcgtcgagccagaggcgcatggccaggcgctggccgccaaaggtctggaccttggccacgccgtcgatggaagagaacatcggctcgaccacccgcgacaggtagtcggtcaacgccgggatcggcagggtcttgctggaaaagccgacgtaggctaccgcggtggtctcgccggaagagcgttcgatcaccgagtcgtaggcacgctcgggcagcttgtagcgcaccgagttgaccttggccatggtctcggtcatcgcctgggtcgaatcgcggttgagcagcatgcggatggtcaccacgctacgcccctgcaccgaggtcgaggaaaggtagtcgatgccctccaccgacgacaccgcctgggcgatcggctgggtgacgaagccttgcatgagatcggcggaggcgccggggtactcggtggtgacggtgatggtcgagctttccagcagcgggtactggcggatcggcagcttgcccagggagaacaggccgagcagcaggatcagcgtgctgaccaccagcgccagcaccggccggcggacgaacaggtcggtaaaggtcatcgcggggttccttcagcggcctgcgaccggcacggggggcgcggcgctgctcagggtgtcttccttgaccggttccacggccatcccgtcgctcaggttgatctgtccggaagtcactacccggtcgccctcggcgaggccctggaggatttccacgcgaccgtcccagcgctcgccgatccgcaccgagacgcgcttggcgctgagcggccggtcgccgtcctggtgggcgacgaacacggtgtcgccgtaggcggtgtaggtgactgcggtttccggcacgctcagcgacggcgcgtcggctttgcgcgagacccggatgctggcgaacatgccggcggcgagcaggccttcggggttgtccagcaaggcctggacctgcaccgtgcgcgacttgccgatcagcgggtcgatggcgctgatgcgcgccgggaagctgcgccccggataggcgtcgaccaggacctcgaggggctggccgagcttcagctcgggactggtgctttcgtccagggagaaattgcttttcagggtccgcgcatccaccaggctggccaccggctcggcgacgccgaggtactggccgaggtgcacgcggcggatgccgagctggccggagaagggcgcgcggatcgccttctggtcgatcagcgcctgggtctggcgcaccgcgccgagcgccatgtcgcgggcggcgacggcgttgtccagctgttcctgcgaggcgacgttgcgctctaccagcttgcgcgcacgggcatggaggatctcggcattgcgcaactgcgccttgagacggatcagctcggcctgttccaccgcgtcgttgagttgcaccagcaactgcccttgctgcacctgctggcccgattcgaaggcgatgcgggtgatccgtcctgccgcttcggcggccacctggacctggcgaccggcctccagctcgccgacgccatcgaagacgcgcggcaccacccgccgctccaccgaggcgagggcgacctttaccggcgggtagccggcgaaaccgccggcgtctttcttcgccgagccggtggcgtagacggcgatgccgataaccgccgcgcagatgagcgcggcactggcgatcaggacgggtttctgcatgatcgcctcaggccttctggtaggtggcggccacggagacgtcctggcgcagccgctggcgttgcgcgctggcgatggccgtggcgatcaggccgccgatcaccgcgatgtgttcgagggcgaagaacatcgccagcttggcttcgacgccggtcttgctccagaaggtgtggacgatgaggatggtcagcagcaggaacaccgccagcgccccggcgccgagccatagcttgcggtccagcaggaccagcgcggagccggccagcagggtcacggcggtggcgatgttgaacagccaggccggctccaggccggcggcgcgcatttcctccaggctggcctgatagtcgaacagcttcgccagtcccgaggcgacgaacatcagggccaggcagatccgggcggtcagccagagccagttgctttcgagcgagttatcgatgaagcgctgcatgggtcgttccttgtgctggtcgccatccggcgccgcgaagcggccgtgggggcggttcgtggtcctggggaaacggggcggtatgaccgcagcggggactataaaacctcaagttaagttgaggtcaagggcgtctgtgattagcgctataggccttgctgggcgtgggtttaaggtggattcgttggtgtcgcgggacggtgggatgaggggctgacgattggtcgcggggactattgggggaggggctgggtgtagcttgcgggcaacccgtcgcgacggttccccctggagcgagacgccttcgcggcatcactgtcgctcgacccgctgcgcgacgattcgacctcctgccggggcgagttagctcccccatcgtctggagggcaagcatgacaaacctctacgtggcggatcctggttccgtagggcgaataaccgcttgcggttatccgccggttctccgggacagcggcggataacgcccctggcgttattcgccctacaggacttgccgtatgtgggcggaagctccatgcctgtgggccttggagccagggcgggcttcgggtctggctccgtggtgcggatgaccgcttagcgccgatccgccggcccagcggcatatcggcggatggccgagcgcaaggtcacggcaccgccacgaagcgcagatcgctcggcgaccccacctcgacgctttgcagcgtcttgcccacctggccgctctgcggatcgcgggcgaacacccgcaactggtcgctgttctggttggccacgaggacgaagcgcccgccgggcgagaaggcgaattcgcgcggctcggtgccttccaccgagcgccgttcgacgaaacgcaactggccgctggccgggtcgacggcgaaggtcaccagttggttgtcgtcgccgcgattgagcacgccgaggaagcggccgtcggcggacaggtgcagggcgccggcgccgactttgccctggaagccggcaggcgccaggtcgtgggtctgcaactggcgcaggcggccattgccctcatgggcgaacaccatcacctggccgctcagttccagggtcaggtaggcgaaacgcccgtcggcgctgaagatcagatggcgcgggccgctgccgggcggggtcgggacgaatgccggatcggccgcctgcagcggacgttcggcctgttccggggcgtagcggtagacgaataccttgtcggcgccgaggtcgggggcgaacaggtactggccgtcgggcgaggacaccaccgagtgcacatgaccggaaacctggcgcggatgcaccttgctggcctggtgcgactccacctgcaccaccggcgccagcgagccgtccgcgcgcaccggcagtaccgccaccgagccttccggctgtaccgagtagttggcgacgaacaggtagcgaccgtcgtggctgaggctgctgtaggtcggatgatcgccgagggtctggacctggctgatctgttgcaggcggccgctgatcggatcgaaacggtaggacgtggcgcgaccgacggtatcgcccttgccgccccgtccgttctcgttgaccacgaacagagtgcgttggtccggggcgaaggtcaggtacgaggggttgctggtatgggccacgcgcagcgggcctttcaccgagccgtcggcgccgtcgaagcggtagacctggatgccttcgctggagccttcggtataggtccccaccagcaggttgtagaggctggcggcctgggcctggggcgccacgccggtgagcggcgcgagggccagcaggcagagggtgggcagtcttctcatgggcaactccttggctcgctattgttctgatggctcggggttggaccggagccaggccgttgggttcgcccctggccgctcagtcgccggcctggcccagcacgccgcgccagcgttcgaaggcggcggtcgcgtagccttcgcgccagaccagccaggtgtctacttcggcaaggggcaggctgcgcagcggcggcgtgccgagcagttgcagcaccgagcgcggcagcacgccgacacaggcgccggcggcgacgcaggcgaggatcgcatggtaggagccgacttcctgcaccgtcagcggcgtgcccaggctgtcctcggccagttgccggtaggtgcagccacgggcgaagccggccagggtgcgcaggcgcacctcggcgacgtcgtggaccggcgggtgttcggccggcaggatcatcagcagttcctcgcggaacagcggctcgccgcgcaggccgctgccatcgagttcgccggcccaacccgggccggcggccaccagcgcacagtccaggcgccgcgcccgcaccccatcgaacaacgcgcgactggtgccggtggagacttccagggcgacccgcggacaggccttgtgatagctcgccagcagcgccggcaggcggctggccgcggtgctttccatgctgcccaggcgcaggcgcccgccgggctcggcgggatgcatcgattgacgcgcctcgtcggcgagagccagtaactgctcggcgtaggcgaggaattcgctgccgcgttcggtcaggctcatgcgcttgccgtcgcgcaggaacagttcgacgcccaggtcctcctcgagctggcggatccgcgtggtgacgttcgactgcgctcgctgcaactgctgagcggcgcgggtgacgctggcttcgtgggcgactgcgcggaagatttcgagggaagaaaggtccatcgatctatctctttatgagaatgaattgttaaaaatattcttttatgaagatatattggtcaagcgtcggccgacgcggtgtcgtccgaccgggagagggaatcgccatgactgaccgcttcacgcgcctgctcggtatccagcagccgatcatccaggcacccatgctcggcgtctccacgccggcgctggccgccgccgtatccaacgccggcgggctcggttcgatcgccatcaccggtagcgccgccgagaagggccgggcgctgatccgcgaggtgcgcgggctgaccgacaagccgttcaacgtcaatctgttctgccaccgcccggggcaggccgacccggcccgcgagcgcgcctggctggactacctgaagccgctgttcgccgagttcggcgccgagccgccggcgcgcctgaacaacatctacctgagcttcctcgaagacccgaccctgctgccgatgctgctggaagagcggccggcggcggtcagcttccatttcggcgcgccgccccgcgaccaggttcgcgcgttgcaggcggcgggcatccgcgtactggtcagtgccaccacgccggaggaagcggctctggtggaggccgccggcgccgatgcggtggtcgcccagggcatcgaggccggtggccatcgcggggtgttcgagccggagcgcggcgacgccgccatcggcaccctggcgctggtccgcctgctggcggcgcgcggttcgctaccggtggtggctgccggcgggatcatggacggacggggcatccgcgccgccctggagctgggcgcgagcgccgtgcagatgggcaccgccttcgtcctctgtccggagtcctcggccaacgccgcctaccgcgaggcgctgaaggggccgcgcgcggcgcgcaccgcgctgaccgtgaccatgtccgggcgcagcgcccgcggcctgcccaaccggatgttcttcgatgccgccgcgcctggagtgccgcccttgccggactatccgttcgtctacgacgcgaccaaagcgttgcagaccgccgctctggctcgcggcaaccatgatttcgccgcccagtgggccggccagggcgcggcgctggcgcgggagctgccggccgccgaactgctgcgcacgctggtcgaggaactgcgcggctgagggaggccgttcgctgcgcgcgacgatgactgtctctgttcagttacccctgtgttgtgcttttctgcctccagcactggaacgacaggtggaacatgggacaggacaagttgaaggtcgccgttctcttcggcggcagcagtgaggaacgggacgtctccatcgccagcggcgcgcaggtgatccaggcgttgcgcagcgccggccaccaggtgctggcggtggataccgccagcggcctgctcggcgcggaggaagagcgccgcctgctggcgagcaaggtcaaggaggtcccgccggactccgactcgctggcgatcatccgcagcggcaagcagagcctgctgagcgccggcgaactggctggggtcgacgtgttcttcctcgccctgcacggcggcaccggcgaggacggcaccctgcaggcgctgctggatgccggtggtttcgcctataccggcagcggccacctggccagcgccatggcgatggacaaggacgtggccaagcgcctgttcctcgccgccggggtggagaccgccagttggctgatggcgccggcctcggaagaggcggtgcgcgagcaactgggcttccccctggtggtcaagccgaacagccagggctccaccgtggggctgtccatcgtgcattcccaggccgaattgcagccggccatcgagctggccgggcgctatggcgacgaggtgatgctggagcgcttcgtcgccggccgcgaggtcaccgtcggggtgctcgacgaccaggcgctgccggtgggcgagattctcctcggcggccaggaggtcttcgactacgagcacaagtaccaggccggcgcggtgcgcgaggtgtttcccgccgacctgccgccggcgatcgccgccgaggcccagcgtctggcgctgaaggtacaccgggcgctgaagctgagcggctacagccgcaccgacttccgcctcgacgaacagggccggctctggtgcctggaggtcaataccctgccgggcatgaccgccaccagcctgctaccgcaggccgcggcggcggccgggatcggtttcgccgaactctgcgagcggatctgccggctcggcatcgagcgctgcaagggcgcgcgcaaggcgcgttcctgattcccgcggcccgccgccggggcgggccgcgcctttcgctcaggcctcgaggttctcgacccgctcgagggtgtcgtagaggctgtagcgctcctgttcgtcgcgtcgcacccggcccatggcgacgcacggatcatgggtgaagaccagtcggccgttgcgggcgatgaggctgtccagcaggcgttccttttcctcgatcaggccttccgggaagcggtcgtagcccatggtcagcggtaggtgtacccagggtgcgccggggatcaggtcgccgctgaataccaccgggccgtcgggcatggcgatctccggaagcatctggcccggggtatggccttcgctgaaatggaaacgccagccctcgcccagatgcgccgagcgctcgccgtcgtcgagcagctccaggcgtccgctggcctgcagcaggtcgagcagttccggcacgaacgaggctcggtcgcgcgggtgcggctggcgcgcgcgctgccagtggcggcggccgctgacgaaatgcgcgttggggaacagcaggcgcgccggctggccttcttcccaggcggcgagcaggccgccggcgtggtcgaagtgcaggtgggtgagcagcaccacgtcgatgtcggcgtcgtccaggccgaccgcggcgaggctgtcgagcagtacgtggcgctcttcctggacgccgtagcgctggcgcagggcgggcgggaagaacgcgccgatgccggtctccaccagtacgttgcgctcgccgtcgcgcaccagcagggcacggcagccgaggtcgatgcggttctccgcatcgggctgcatccagcgtgaccagagcgcgcgcggggcattgccgaacatggcgccgccgtcgagtttctggctgttgccgaggagggtggtgagggttcgcatggatatgtccttgttcctggtctagcgaataaccggcggttgcgtcgtttttcaagaatgcctggccggcttcccgggcgtcgtagggcgaataaccgcttcgcggttatccgccgttatcgcgggctgtcggcggacagcgcgttgcatgctgtcccggaaaaaacacgcggcccacgggccgcgcgacaacgctcgacggaagcttcagaactgttccgcctccaggccgtacaggctttcgctgccggcttcgacggcggcggcgagggagtgcacgcggggcaggatgcgggcgaagtagaagcgcgcggtggccagcttgccgtcgtggaacgccgggtcgacctcgcgctggcgcagcgcggcggcggccatgcgcgcccagaggtaggcgtaggcggtatagccgaacagatgcaggtattccaccgaggctgcgccgatctcgcgcgggtcgttgccggcgcgggcgacgatgccctgggtgaggttgtccagcaggtccagggcggtcagcagcggggtgacgaactccgccagttcggcgttggcgccggcggcgaaggctcgcacctcgcggctgaagatggagaggaacagcccgccgttggcgaccaccttgcggcccatcaggtcgagcgcctggatgccgttggtgccttcgtagatctgcgcgatgcgtacgtcgcgcaccagttgctcctggccccattcgcggatgtagccgtggccgccgaacacctgctggccgagcacgcagctctccaggccggtatcggtgaagaaggccttggccaccggggtcaacagggccaccagggcttcggcctggctgcgttcttcctggtcctcggcgtacttggccaggtcgagctgctgcccgacataggtggaaaaggcgcggccgccctcggtcagcgccttcatggtgagcagcatgcggcgcacgtcggggtgcacgatgatcgggtcggcggccttgtccctggccaccgggccggtcggcgcgcggctttgcaggcgctcgcgggcgtaggcgacggcgctctggtaggacatctcggcgcagccgatgccctggatgccgatggacaggcgctcgtagttcatcatggtgaacatcgccgccaggcccttgttgacttcgccgaccagccagccactggcgccgtcgaagttcatcacgcaggtggccgaggccttgatccccatcttgtgctcgatggagccgcagtgcaccgcgttgcgtgcgccgagcgcgccgtcgtcgccgaccaggaacttcggcaccaggaacagcgagatgccgcgcgaaccggccggcgcgtcgggcagcttggccagcaccaggtggatgatgttctcggtgaggtcctgctcgccgccggtgatgaagatcttcgtcccgctgatcctgtatgaaccgtcggcctgcggctcggccttggtgcggatgatgcccaggtcggtgccggcgtgcggttcggtcaggcacatggagccggcccaggtgccggcgtacatgttcggcaggtacctgttcttcagctcctcgctgccgtgcgcatcgagggccaggcaggcgccggcggaaagggtcgagtagaggctgaagctggcgttggccgcgtacatcatctcctcgaactgcactgccagcatcttcggcatgcccatgccgccatgggccggattgccggtgaggccgacccagccgccctcggcgtaggtcgcgtaggcctcgcggaagccggccggggtgcgcacggcgccgtcctgccactgcgcgccttcttcgtcgccactgcggttgagcggcgcgagcaggccgccggtgaccttggccgcttcctcgaggatggcgtcggcggtgtcggcgtcgatccgctcggccagtcgcggcaggcgctgccacagggcgggggcgtcgaacacgtcgttgagcaggaagcgcatgtcgcgcagcggggcgttgtattcaggcattgcacacctcgtcggtgaacggccggcgggacggccgcaggtacagggttgcccgtgcgcatcctgcctacggccgccgtggcacggccgctgcacgggcaattcggctggcggcgctcagagggcggcggcccactcgcgcagcacgtatttctggatcttgccggtggaggtcttcggcagttccgagaacaccacggtacgcggaatcttgaacgcggccaggtgttcgcgacagaacgcgacgatctcgctctcggcgagcccctgatgatcgctcttcagggtaatgaacgcacagggcgtttccccccacttttcgtcgggccgcgccaccaccgccgcctccagcaccgccgggtggcggtagagcacgccctccagttcgatggtggagatattttcgccgccggagatgatgatgtccttgagccggtcgcggatctcgatgtagccgtccggatggcagaccgccaggtcgccggtatggaaccagccgccggcgaaggcttcctcggtggcgctgggattcttcaggtagcccttcatcacggtattgccgcgcatgaagatctcgccgatggactggccgtcgcgcggcaccggctcgagggtcttcgggtcggccaccatcaccccttcgagggtcgggtagcgcacgccctggcgcgacttgatcgcggcgcgtcgctccagcggcaggtcgtcccactcgccgtgccaggcgcagaccgtgaccgggccgtagacctcggtgaggccgtagacatgggtgacgcggatgcccatctcttccaccgcgccgatcaccttggccggtggcgcggcgccggcgaccatggcatgcaccgggtggtcgatggcggccttggccgagtcgggcatgttgatcagggcgttgagcacgatgggcgcgccgcacaggtggctgacctggtgctcgcggatcagggtgaggaccttttgcggatcgacccgccgcaggcagacgtggacgccggccagcgcggtcaccgtccacggatagcaccagccgttgcagtggaacatcggcagggtccagaggtacaccgggtgctggcccatggaccaggtcatctggttgcccagcgcgttcaggtaggcgccgcggtgatggtagaccacgcccttggggttgccggtggtgcccgaggtgtagttcagcgagatcgcctgccactcgtcccggggccattcccaggcgaactgcgggtcgccctcggcgagcagcgcctcgtagtccagttcgccaaccgggcggccttcgccatactcggggtcgttgacgtcgaccaccagcggcgggtggtcgagcataccgatggcggcatggatcacctcgtggaattcgtagtcggtgatcagcaccttggcttcgccgtgttgcagcatgaaggcgatggcttcggcgtcgaggcgtacgttgagggtgttcagcaccgcgccgatcatcggcacgccatagtgcgcctcgagcatctcgggaatgttcggcagcatcaccgccaccgtgtcgccctggccgatgccgcgcccggccagggccgaggccaggcgtcggcagcgttggtaggtctgcgcccagtcgcggcggatgttgccgtggatcaccgcggggtagtgcggatagacgctggcggtgcgctcgatgaagctcagcggcgtcagggcgatgtggttgacggcggcgggcgcgagaccctgttcgaagatcgacatgaagagtaccccgtggctgattgttagctctgttctgggtaagggtcacgatctgccgcgcgcggagagactgcgtcgaaaacggctggtttctctggctcggcagatcgtgaacagcttccaaggaccaggcgaagcgctccttgggttggggcgatttatagcaacgatgaaaaatatatggaagttaaaccataagcttatagtataaataccatataagttcccaggatcatcttccgcccatgagtccgcttcccgcttcgcctgccctcaacagcctcctgcgcctgctgcgcgagggcgcgccgctggtcgagcgggtcggtgcgctgcgccgcttgctgctcgaacatccgggcacgcgccaggcctggtacctggcctggcagccgcaggcgcagacctataccccggtgccgccgtcgccggcgctgccgccgggcgccggcgagccgaaccgggccagcgacctggcgttgcgcgagcggctggtgcgcgacggccggctggctctggacgaattgcggcgttccgcgtcctggctcggcgcgcgcttgcggcgtgccggcgtggagcatggcatggccttcgccctcgacctgcaggccggcgacgaaggcctgctgctggtggccagcgatacgccgcagagcgctgcgctggactggctcggcctgctcctcgcaccgttgctcgccgccgcccgtggcgtcacccgcgctgcgccgttcctcgcggccgacccgcagccggcgctgctgctcgacggcgaggcgcaggcggtggaattcaaccaggccttccttgccttgcttggcgagcggccgcgcgaggcctggcgcgcttacctcccggccaaccatgggcaactggtgcgcgccagcctggggcaggcgcgggccctcggcgaggtggaggcggagtgcgacggacgcatcctgctctggcagttcattcccgacagcgccgaggcccgggtgctggcgcgctgccgcgacgcaaccgccagcctgcgcggcgagcgcgaggcggcgcgggccagccggctgtaccggctgatcaccgagaacaccaccgacctgatttcccggcataccctcgacggcattttcctcgacgcctcgccggcctcctggaccctgctcggctactggccggaggaactgcgcgggcgtccggcgcaggcgttgttccacccccaggaccgcggccaggtggcgctgcgcgcgcgcgaagcgctggagcaggacggctatctgaccatcacctaccgtatccgccaccgcgacggccgctaccgctggttcgagaccgccagccgggcgatccgcgagacctacaccggggcggtggtggaggtggtcagcgtgtcccgcgatgtcacccggcgggtcgaggcggaggagaaccgccggcgcctggccgaagtggtcgaggcgaacaccgacctggtgctgttcgtcgagcatggcggccgcgtcacctacctcaatccttcggcacgtgccgccctcggcatcgccgacgggcaggaggcgccggcgctggaacgcctgctggccggcgacactccggcgcggctggccgaagagggttggcgacaggcgcgcgatggcggcgtttggagccgcgaggggcgcctgcaaccgcaggacgggcgtccgtcgctgccagtctcgctggtgttgctggcccatcgcggccgcggcgaggagcgctattactcgctggtggcccgcgacatgaccgaacgcgaactgcgcgaggcccagcagcgccgtcaccaggacgaactggcgcacactgcgcggctggtcactctcggcgaactggcctcgggcatcgcccacgagatcaaccagccgctggcggcggtgatgaactacgccagcgccagccagcgttacctggccgtcctcggcagccagcccgaggccgccgggcgggtggccgaggggctggcgcggatcggcgagcacgccggccacgcggcggaggtgatcaagcgcctgcgcgccttcctgcgcaagggccagcggcgcctgcaggcgctcgacctcaaccaggtggcacgcgaggccatcggcctctgcgcgtgggaagccgggcactggcaagtggcggtggaagaggcgatgaccgacaatccgccgccgctgtatgccgaccgcgtgctgctcgaacaggtgttcctcaatctgctgcgcaacgccatcgaagccaaccgcgaggcgcatcccggctcgccgtcgcgggtcgtcatcggtagccgcgtcgagcccggcgggctgctctgcctgtgggttcgcgaccagggaccgggagtgccggcggatcagctggaacacattttcacgccgttccacaccagcaagccggaagggctgggcctgggcctgtcgatgagccgcagcatcgtcgagggcttcggcggcaccctcgaagccgagctgccggcggatggcgggttgctcatgaactgccggctgccgctcgccgccggcgccacgggaggttaacgatggctatgcctgacgaagcgctggtctacgtggtcgacgacgaccagggcatgctcgaatcgacggtctggctgctggaatcggtcggcctcaaggcacggcccttcacccagggcctggacttcctcgatgcctgcgagggcggccgccatgcctgcgtcctgctcgacgtgcggatgcccggcatgggcgggctgaacgtgcaggacgaactgctggcgcgcggcatcgacctgccggtgatcttcgtcagcggccatgccgacgtgcccatcgtggtgcgcgccttcaaggccggtgcggtggatttcatcgagaaaccctacaacgaacaattgctgctcgacagcgtgcagcaggccctcgatcgccacgcccgtcggcgccggcaccacgatctcgacgccgggttgcgcgaacgcctggacagcctcaccccgcgcgagcgcgacgtgctcttgccgctggtgcgcggctataccagccgcgaggtggccgagcaactggaagtcagcgtgaagaccgtcgacctctaccgcgcgcgggtgatgaagcgcatgcaggcccagaccctgccggagctggtgggcatggccatcgccgccgggctggtggacccgctgcgcttgcgcgagggcacctgagcgcgcgcgggccctggcgcggggcgggaagtggcatagttttatatctcatatggttatatgaaaaccatatttcaccggatgtttggttattaatagactgcggcccacccggcgcccgacgtcgaaccccattcctccgcgagatacccatcatgaagattcgcctgcttggcgcagccgtggcggctgtgttcaccctgatcggcagcgctgcccatgccgacgacctggccgacatccgcaaaaagggcgagatcgtcataggcacccttggcaccgacgagccgaacagcttcatcgacccgaagacccgtcagatcatcggctacgaggtcgatcttggtaccgagatcgccaaggccatcggggtcaagccggtgttcaagcagatttccgtggcggcgcgtatcccggagttgcagcagggccacgtggacctgctcgccgcctcgctgacccacaacaaggagcgcgaggcgctggtggatttctcctattcgatcatcgtcaccgggcagaaggccctggtgaagaagaacgccggcttcgcctcgctgcatgacctcgacggcaagaaggtgctgacggtcaagggcggcacccaggagccgaacatccgcaaggcgctgcccaacgcccaggtggtcaccttcgagaccagccagcaggcgctgctggcgttgcagcagggcaagggtcaggccttcgtcgacgacgagtcggcactggtcaacgatttcggcaagctcggcgcggcggccggcggctacgccatcctgccggagaacctgagtaccgaggccctggccatcgccttccgcaagggcaatccgcaactcaagcaactggtcgactcgaccctcgccggtctggagcgcagcggcgcggcggagcagctgtacctcaagtggtacgggccgggcaccaagtccaacctcagcgagcgccacttcaagatcgattccgaccggatccccgagtgagcgcctgacgtctctgcgtgacggcgaccatgcgcgtcgccgcccgtcccctgtgagtcctcgcggacagcgtgcgcctttcccatgttcgagttcgatttctccctgctgctgcgcggccagtaccatgagatgctggtcgccggcctgctgctgtcgctgaagctggccgccgtcaccctggtcttcgccgtgccgctggcgatgctggtggcgctgctgcgcctggcgccgttccgcgccctgcaatggctcggtttcgcctatgtcgagagcatccgcaacgtaccgctgctggcgcacatgctgttctggtacttcgccgcgccggaatggctacccgaggacctcaaggcctggctctacgccggcaacatcgaggccgccagcgctatcgtcgcgctgaccctgtacaccgccgcgttcatgagcgaggacatgcgcagcggcatccgcgcggtgcccacggtgcaactggaggccgcccgcgcgctgggcttcggctacctggcgagcatgcgcctggtgatcctcccgcaggccttgcggatcaccgtaccgccgctgatctcgcaaaccctcaacctgtggaagaacaccagcatcgccacggtgatcggcgtcgccgagctgatgtaccaggccggccaggtggagagttcgaccttccgcagcttcgagtcctttgccttcgccaccgcggcctatctcagcgtatcgctgctgatcaccggcgctgccgcctggtaccagcagcgctatccgggagtcgaacggcgatgaccaccctggaactgatcgatagctactggctgtacttcctcgtcggccagtaccccaacgggccgctgggcgggctggccctgaccctggtcctggcctcgctggcgctgctgctggcgctgccactgggcatcctgctcggcctggcgcgggtcagcccctggcgctggctgcgctggccgatcaccgcgctggtcttcgtggtgcgcggggtgccgttgctgatggtgatcttctgggcctatttcttcctgccgaccctcaccggccagcgcaccgaccagttcaccaccatgctgctggcgcttgtgctgttcgacgcggtgtacctggccgagatcgtccgcgccggcatccagggcctcgaccgtggccagttcgaggcggcgcgttcgctcggcctgggctacctggcgagcatgcgcctggtgatcctcccgcaggcgctgcgcaacatgctgccgtcgttggtcaaccaattcgtctcgacgatcaaggagacctccctgggctacatcatcggcctggccgaagtcagcttcatcgcctcgcagatcaatacccaggtattcaccctgccgacccaggtctacctgatcctcggcctcacctatttcatcctgtgcttcggcctgtcgcgtttcgccttctggctcgaacgccgccaggcgcagcgtggcaatcccaaggaggcccgatgatccggctggaaaaggtcaacaaatggtacggcgcctaccacgccctggcggatgtcgacgaacaggtcggccgcggtgaggtggtggtggtctgcggaccctcgggctccggaaaatccaccctgatccgtaccctgaaccgcctggaaccgatccagggcgggcgcatcctgatcgatggccaggacatccacgctcccggcctggacctcaatcgcttccgctcgcacatcggcttcgtgttccagcagttcaatctgttcccgcacctgaacgtgctggacaactgcaccctggcgccgctccgtttgcgcggcctgaaacccgcggaggcacgccgccaggccatggcgctgctggagcgggtcggcctggcggacaaagcggcggcgttccccgcgcggctttccggcggccagcagcagcgcgtggcgatcgcccgcgcgctggcgatggagccgccgctgatgctgttcgacgaaccgaccagcgccctcgacccggagatggtcggcgaggtgctgctggtgatgcgcgacctggcccgcgacggcatgaccatggtggtggtaacgcatgagatgggcttcgcccacgacgtcgccgaccgcgtgctgttcatggacgccggccgggtgctggagcgcgccagccccgacgatttcttcaaccgcccgcagcacccgcgtgcgcggaagttcctcgccgacatccgcacccccttcgcccaacccctgtgaggaacgccatgagcactccgagtctgccgatcatcgatatcgccgcccttgccggcagcgacccggcggcgcgacggtcggtcgccgtgcgaatcgaccgcgcctgccgcgagcagggcttcttctacgtggtcgggcacggcgtcgaggcgcaactggtcgagcgcctggagcgcctggcgcggcagttcttcgccctcgacgagacgagcaagctgcgctggcgcatggagcttggcgggcgcgcctggcgcggctatttccctcttggcggcgaactgacctccaaccgcccggactggaaggaaggcttgtacctgggcagcgaactggacgctgagcatcccgaagtgcgcgccgggacgccgctgcatggcgccaacctgttccccgaggtgcccggcctgcgcgagacgctgctggagtacctggacgcaaccacccgcgtcggccaccggctgatggagggcatcgccctcggtctgggactggaagccgactacttcgccgcgcgctataccggcgatccgctgatcctcttccgcctgttcaattacccgagccagccagtgccggagggcctcgacgtgcagtggggcgtcggcgaacacaccgactacggcctgctcacgctgctccaccaggacgccatcggcggcctgcaggtgcgcaccccacagggctggctggaggctccgccgataccgggctcgttcgtctgcaacctcggagacatgctcgaacgcatgaccggcggcctctaccgcagcacgccgcaccgggtggcacgcaacacttcggggcgcgaccgcctgtcgttcccgctgttcttcgatccgaacttccatgcccgcgtgcagcccatcgaagggctgcccgaggtgccggaacaggatgacagcgcccgtcgctgggaccaggccaacgtccacgctttccacggcgagtacggcgactacctgctgaacaaggtggccaaggtattcccgcagttgcgccgcgacctgctctaggcgcgcggccggacgctacgctccggccgcgctggcgggttcagccgagcggcgccggcgaccgcaccggctggtaggagcgctcgccgcccagggcttccggcgtacggctgctgccctgcagggcggtgtcgaagaccccggcgaagcgctggcgatcctccaggctggtggccagcgcatggccataggagacgatcgcctggttcaccgggaagcgctcggcctggtagccggccagggcatcctccagcgcgcaggcgtcgcgcaaggccaggtcgagggcgtcggccagggcgctggcgtcctcgatggccaggttcatgccttggccggtgatcggatgcacgttgtggatggcgtcgccgagcatcgccacgttgtccgcccagtagcggtccaggttcaggtagccgatggggatgcccttgaagcgcgaagtgccggtgacggcggcgatcgcctcggcgctctcgtcgccgacgaagcgttgcaagcgccggcgcagcgactcgccgcgagtgtcggccatcagctcgcgcgcctcctccctggggaagctcaccaccagtcgcgcgcggtcgaaaccgatcggatagaagtaggccagcccgccctgcgagtccacgtacaggcggttgcgctcggccacgcagggcgccagggcgaaggtgccgaccagcatcggcgacgggtaggggcggcgttccacatcgatatcgagcagccggcggcgcacgtaggaggcgataccgtcggctcccaccaccacccgcggacgcagcacgcggccgtcgttcaggcgcacctggtcgatcgcgtggcgctcgtcgcgctgcaccgcttcgatgcgggtctcgaacagcatctcgacggtcgcttcgccgtcgatcttttccagtaccaggcggcgcagcgactcgcagggcatgaggatgaaatagccgcgcgcgtcgacgctggaatagttgaaatagcgaagcagctcgccgtcgtgatagacctccagctcatggcggacccgcccaccgcgacgggtcacctcggccaacaacccggccgcctcgaccacccggatgccggccggcttgagcaggtcggcgccgttgatcgcgcgttcgcgccgtgcctgctccactaccactacgcggtggccctggcggccgagcaggtaggcgagcatcgccccgccgatgccgcagccgttgatcagtacatcgatatggttgtccgtcatggatgagtctccgtgtcgttcctggcggaaaagggaagggtggaggcagcagcatagcgacggaacgttatgcagaatgggtgttgtctgcacttggtcgcctgtccggcccggttgtccggtctcgccgccaggcgggagtgccggcccttgcgggccggacagcttcaggaagcgtcgatccagatggtcttcaactctgtgtactggtcgtgtgcccagaccgacttgtcgcgaccgccgaagcctgactccttgtagccgccgaagggcgtcgaggcgtcgccctcgccgaagcagttgacggtgacgatccccgcgcggatctctcgcgacaggcgcagtgcgtggcgcaggctgccggtgtaggccgaggcggcgaggccgtagacggtgtcgttggccagggcgatggcttcgtcgatgtcgtcgaaagaggtgaccgagagcagcgggccgaagatttcctcgcggaacagccggctgtgcggcgagacgccatcgaccacggtcggctcgacgaagatgccagcctcggtggcgccgccgaagcgcaccgccaaccgctccgtcctggcctggtcgaggtacgcgcggaccttctcgaagtgcgccgggctgaccagcgcgccgaggcgattacgcggatccagcgggtcgcccatgcgccactcgcggagctgcgcgccgatgcgttcgagcagcgcctcgcggacctcggcgtggacgatcagccgcgaggacgccgagcagttctcgcccatgttccagaacgcgccgttgaccacgtgttgcgccaccaggtcgaggtcctcgacatcgttcatcaccaccgccgggttcttgccgccgcactccagtaccacccgcttgaggttggactcggcggcgtacttgaggaacaggcggccggtcgcggtggagccggtgaagctgaccatcgccacgtccgggtggcggcccagcggttcgccggcctcgcggccgccgccggggaccacgttgaacaccccggcggggatccccgcctggctggccagttcggcgacgcgcagggcggtcaggctggtctcgggggccggcttgaccactacggagcagcctgccgccagcgccgggccgatcttccaggcgagcatcagcagcgggaagttccacggcagcaccaggccgaccacgccgatcggctcgcgtaccaccatggccagcgccgccgaaccgaccggggcggtgctgtcgtagatcttgtcgatcagttcggcatgccagcgcagggtattgatggtttccggcaggtcggtgtgctggcattcgcggatcggcttgccgctgtcgaggctctccatcaccgccagttccagcaggtgctcttccagcagctcggccaggcgcagcagcgccgccttgcgctcggcgggcgtgcgcgagcgccagcggccgtcctcgaacgcccgccgcgcgctggccacggcgtgcccgacgtcctccgcgtcgcaggcggcgacctgcgccagcagctcgccggtggccgggttggtcgaggcgaaggtgcggccgccgcaggcatcgcggaaccctccgtcgatgaaggcgcgctggggaaggtccagcgtcgcggcgatggccgcgtattcctcccggctcagcagctcagtcatggcggccaccctcgacgatccgcgcgacctcgcccttgagcctggcgacgatctccgccagtgccgccttgccggcctcgtccagcgccttcagcggcgcacgtacgccgccggcgcgcaggccggccagttcgcagccgtgcttgatcgactggacgaagtgaccgctttcgagaaagtccatcagcggcatcatcgccgccatgatgcgccggcccttggcgaagtcgttctcgaccacgcaggcctggtacagggcgaggtgttcgccagggatgaagttggagccggcgcagacccaactgcgcgcgccccaggcgaagaactccagggcctggtcgtcccagccgcaggacaaggcgatccgcgggtggcggcaggccaggcggtgcaattgcgcggtggagccggagctttccttgatcgcgacgatgttgcggcagccggcgacggcggcgaagaacgcctcgtccatctccacgcccatccgcgccggatagttgtagagcatgatcggcaggccggcggcgcgatccaccgccagcacgtgctcggcgatctcccgcgaggtcggcagcgcgtagggcggcgagccgaccaggatggcgtcggcgccgatggcgcgcgcggcttcggcgtaggccagcgagtcctcggtgcggatcgcgccggttcccaccaccagcggcaggcgcccggcgatgacttcgctggcgtgggcggcgagggccaggcgttcctcggcggtgtgcgcgtagtactcgccggtggagccgccgatcacgatgccgtgcaccttcgactcgacgagaaactccaggacctcggcgaaggcctgggtgtcgatgctgccgtcggcgctcagcggggtgatggcgggggtatagataccttcgaatttcacgggggttcctcctgtgggatgctgggccgcggcgcacccggcggacgctgccgcggcgggtggttcaggtgagcgaagccgcctgctgcaggttcagcgaacgggtttccggcgccagggcccaggtcacgagcagcccgagcagggtcaccagcgcggcggcgtacatggtctgggcggtacccagggtttccagggaaagcggcaccaggtaggtgcccaccgcggcgccgacgcgcgataacgaggtgccgacgccgaccgcgaaggcgcggatctcggtggggaacagttcgttcgggtagaccagttgcagcacctgggcgccgccgatgaacagcgcgtaggcaccgaacaggccgaggatggtcgcctccgagccggcgtggaagacgcccagcccgagcagcgccaggccggaccagaggaagctgtgcagcagcatgcagcgccggccgatgcggttgatcaggcgggtggcgatgatgcagccgatgacgaacagcagggtgatcgccaccgaaccgtaggaggcccagtcgcccttcaggttcagcgccagcagcaccttgggcgcgaaggcgtagacggcgaacacggggatcaccgagcaggtccagaacagggtgacgaagagcatgcgcttgccgtagccggcgtagagcaggtgccagatggtgaccttccgttccagcgcctgttcgggcaggttctccagcgagaaggcttctccgtagacctggcggatgacccgctctgcgtccgcgtcgcggcccttgctcagcagccagcgcggcgactcgggggtgccgatgcgtagcaggaacagcacggcaccgatcgccgcggtgctggccagtaccaggcgccaggcgtcctcgccgccgctgcgcaggatcaggtcgccgaccaggtaggcgaaggcggcgccggcgaaccagaggatggtcagggtggccaggcgcggtccgcgatacttcttcggcaggaactccaccagcaaggcggtggcgaccgggtactcgatgcccaccgccacgccgatcaggaagcgcaggacgaacagcgccgccgccgagtcgaccccgtactgcgccagggaagcgaggacgaacaggctggggccgacgaagaacagcctgcggcggcccaggcggtcggtcagccagccgccgaggaaaccgccgaagaagatgccgaccagcgccgaggcggcgatcatgccctgccagaaactgctcagttgcaatgccgcggtcatctgcagcatcgccacgccgatgatgctcagcacgtagccgtcgacgaaggagccgccgccggagcgcagggtcaacagccggtggaaggcgttgaggggtacgtcttcgatcgaggtcgtaggatttgtcattattgtctcctggttctaaccgctgccggtgaattcgggccgagcgaatccgcgaggctggaacgctctccagctccggtcttcaatggccgtctgaatcgaagtcggcgcccgtgggcgcgttactagggatgcctagctttctctacctgctcgatactgcccccacctcaggttgaggttcacgccaagggaaaggagtggttcgggtggattgccgctgggaccgggcgcgcgcagcaggaagtcgatcagctcgttgcgttcgcccgccagccagtcggccagcagcttcccggtgacggtcccgcgggttacccccaggccgttgcagcacagggcgccatagacgttgggcgccagctcgccgaagtgccccatgtggttcctcgacagcgccagcgagccgccccaggtgtagtcgaagccgacttccgggagcatcgggaagcgctggcggaacgaggcgcgatggcgtacggcgaagcgctcaaggtacttcccggcgctgcgtccgtcagggttgaaactgaagctgttgcggatcagcagacggttgtccggggtacgcctcaccgtggtgccgtaagggtcggccgggatcaggccccagtaggggcgcccgccgaggcgggcctgctcctcggcatcgagcggccgggtcaggctggcgtaggtgaagatcggcagcatccgcccctggaggaagccgaagctcatgccgaaggcgttgttggcgaggaccaagcggtcggccaggatgctgccgtggggatggctcagcagggtcctgtcgccatattccacggcggtgatcggtgtgtgttcgtagaggctgacgttgcccggcaggctgtcggccaggcccttgaccagggccgagggctgcaccagcagggtaccgggggtgaacagggccttgcgatagaaagcggtgccgatgtgtcccgggaggtcgtccgcctcgatcacctcgtaggcctggccgagccgatcgaggccgcgccggtaggcgtcgagcacagccacgccgcgcgcctcgacggccgcctggtacttgccgcaggccttcatctggcagtcgatggcatggcgctgtacctgttcgcggagcagcgactggccggcgagattgagcttcaggccgatccgggcggtcgctatgtcgccgatgtagtcgtcggcgccgatgtcgtggggcaggtcgatggcgaagccggcgttgcgcccggcggtaccgaagccgacttcctgggcctcgaccaggacgatctcctcgtcgggaaaatgcagcgccagctggcgcgcggcggcgaggccggtgaagccggcgccgaccaccacccaacgggcggcgctcctgccgtagtgggccggcttcggccgccgcggcgggctgaggtgataccagccgcaggaacggtcgtcggccggaaggtgggttactttcgtcatcgcagggacctgactcttgttattggaacccggtaaccatcccctgcgtgaccgcctccgcttctcgggcggggccgtggcgcgggggctcgctaaccctcgtagaccagcgccacctccactccggccggtgccgcgtactcggccatgcgccggcgcgacagctcgaaatgcgcacggacgatgtccgccgccgcatccggatcgcgccgctggatggcatcgacgatctggtcgtgctggtcgcaggcgagttccaggtcgcgttgcatgtcgtcggtggtcggatggcggtagaagatcttgcccagccgcgcatggtcgatcagcaagcggcgcaggctcggcatgaggtagtcgttgtgggccatcctgccgatctccaggtggaaggcgtcgttgtggatgacgcggttttccacatgcttctcttcgatggccttgcggaaatcttcctggatcgccttgagcgtctcgatctccgcttcgctggcatgggtggccgccagttgcgtggtggcgatgtagatcagcggcgcggcgagaaagaaggcgtgcagcgagtcgtggctcatggccgcgacgcgcggcgcacggttggcttccagttcgatgtagccctcggcggcgatctgccgcagcagttcgcgcaccggcgggcgcgagaggccgaactcgtcgcacagggcgagttcgtcgacgaccgcgccgggcgccagttccatgctcaggatccgccggcgcagcgcatcgcccagcaccgccttgcggtcgaagggggcatcggcgctgttcgagtcgacgtcgggttgggctttcatggaggcctttctacttgtcatgggctgtgtctacagtttgtataatgactataggatcctgttagacaatatgtctacaggtttttcggggcgtttccgtaccgttcgtccgcgctgtttccgctgacgccggggcgtgcgaaaggggcagccccccgagggcgtatttgagcatattcccccggcgcgccagggaggcgccaagtcacatggcttgcgcatatgatggagcgcccggggttttcgccgtgacggcaggcgtcgcggcccgctggccgggaacaagaagaacaagaggcacgaatcgatggaaagaaggcgtttcagcgccgccctgcaagggcagaacctcaggttcaccggggccggggaggggggctcggcacgggcgcgggtgggcttcctgctgctcgaacacttttccctgccggccttcacccaggcgctggacaccctggtgaccgccaacctgatccgcagcgagtccttcgcggtgagcaacttcagcctgagcggcgagccggtgaccagcgacctcgggttgctgatctgcccggacctggcgctcgcctcggcggcgctgcaaggactcgacctgctggtggtctgcggcggtttgcgcacgcccctgcgctcgtccgccgcgctgcgggaagcgttgcaggacgtggcgtcgcgcggcgtcgccctggccgggctgtggaacggtgcctggttcctcggcgacgccggcctgctggatggctaccgctgctgcatccatcccgagcaccgcgccgccctcgccgagatcgcccgcaacagccaggtgactagcgacagctatatggtcgaccgcgaccgcctgaccgcggccagccccaccggcgccttcaacctggcgctggagtggatcgcccggcgccacgggcgcgacctggtggaggcggtggtggatatcctcgccttcgaggagtcgcgctaccggcgggtgcgccccgccctgcacgagaagatgagcgagccgctgcgcgaagtgatcaacctgatggcggcgaatatcgaggaaccgctcagccaggaacagctcgcccactacgtggggcgctcgcggcggcagatcgagcgattgttccagcagcagctcggaaccacgccggtgcgctactacctggagttgcggatcaccgagtgccggcgcctgctgcaacattccgacctgaccatgctggaggtcctggtcgcctgcggcttcgtctcgcccagccacttcagcaagtgctacaccgccttctacggctacccaccgtcgaaagaagtgcgctacggcaacgtccgctcgacgaaatgagggcgtttcgccggacgcggccggcatgctagaacggacctttcgccctggcctgcggaggtcctgcgccatgtcccagccttttctctggcgtcgcgtcaacgactcgtccggtttcgccgagccgcgggtgttcatccgtgtctacctggaaccgggcagcatcgatgcggccatcgctttctacgaagacctgcagggcgtcgcccacgacatgcgcttcgactttcccgagaaacgcctgacactcgccgcagtcggcgccttcctcctgctggagggcagcgacgaggcgctggcgccgttccgcagcaccactggcaccctgctggtggacgacatcgagccctatcaccggcggttgctggctgccggcgcgcagatcatcttcgggccggcgcgcgcgcccaccggcgcctgcttcaatgcgctgctgccggacggcacggtggtcgagttcgtccaccaccggccgcagccgggcgaggcctgaacctcagccgtcgcgccgggcggcgcaatcgtccatggccgcgccgatcgcctgttcgccgcgggccagcagcgctgcgctggcgccgcggatatcgcgggcttccttgttctggctgagcttgaacttgccgaccaggcgggtgatctcgatttcgatgccgacgatcagccggagcatctcgtcgatgtagtcggcggggccgtcggtcattttccagggcgtttcctgggtcgcctcgtgggtgcgggtcaggcgcgccaccagtccgcgcacatagcgttcgtcgtcgcggatccgcacccggccgtgggcgtggaccacccggtagttccaggtcggcacctggcggtggtgctcctgcttgctcgggtaccactgcggcgagatgtaggcatcgccggcgcggaacaccaccagcacctcgtcgccgtcgcgcagctcgctccaaaccgggttgttgcgcgcgacatgggcttccagggtgccttgcgcgcccttttccgggctcagctcgaacggcaggtggttggcgtccaggcccgcttcgccgtggctgaccagcaggcccagcggatagtcccggatcagcgcgtgcagcgcctgcgggtcggactcttcgaaatgcgaaggcaggtacatgttctgttctcctcggggactcggcccttatacgctgtcggtgggttccgtcgccacgcacagcaggcgcgagtcggcgcgcatgccgggcatcatcaggcgcaattcgtcgagcagcaggccgcccgcttcgtgcagggccgccagcggcatttccggcaggctctcgaggatgaaccacatgcgctgggcgctggcatccaggcgggtgcgcacgccctggcgccagttccagcggcggcaggtgacgccgaggtcgtcgcgccagaccacctcgccggggtcgggggattcgtcgaccgcctcgccgttcttcagggtgtcgaaggtctcgctgccgtcggcgaccaccaggcgcggcgtgccggcataggcggcgaggttctcgccgcctaccggaatggcgaattgcacgctgatggcgttgtacaggtccaccaccgggtcgatgctcggcagcccaccgtcgcgcagcgcacgcttgcgcagggcttcggcggagcagggggtgcgctgcggcttggcgccgaagcggcggaacgcctcggcccaggctgccaggtgcgcctcggcccagtccggttcgccacgcgccagcgcctggcaggcgcgctctacggcgcggtcggcgatttccggacgaacgatcggcgccgcctcgacggtgaggctcagggcgcggaaaccgggggcgagggcggccacctcggcggcgatgacggggaggatcggggcgtgctcgggcatggtcgtcttcagggttcggtgagatggagggggcggggcgcgtaaagcggtaggtggatttctaccatccgggctccgccctcaccatgaaatcagcgaatgaattattagctgtgctgatgatcgggtggtcgggttcagctgcgctaatggcgggagcgccgttcgcttgccggcgaagccggcgccagagccttccgccggccgggaggggctggacagcgagacgcgaggggcgcagtgttcgagcggtcagaaccgccaccacccgaggtagaacgcagatggccaaggcagccgatgtggttgtgcaatgcctggaaaacgagggcgtgcagtacgtcttcggaattcccggcgaggagaatctcgacctgctggagtccctgcgcaagtcgcagatccggctggtgctcacccgccacgaacaatcggccggcttcatggccgccacctacgggcgcctcaccggcaagaccggggtcagcctgtcgaccctcggcccgggcgccaccaacctggtcaccgccggcgcctacgcctacctgggcggcatgccgatgctgatgatcaccgggcagaagccgatcaagaagtccaagcagggccgcttccagatcctcgacgtggtcggcatgatgcagccgctgaccaagtacacccaccaactggcctccgccgacaacattccctcgcgggtccgcgaggcgttccgcctggccgaggaagagaagcccggcgcggtgcacctggagctgccggaggacatcgccgccgagcagaccgacagcctgcccatcccgccgagcctgagccgccggccgctggcggaatacaaggcgatctgcgccgcggtggagaagctgcgcgccgcgcgcagcccgatcctggtgatcggcgccggggccaaccgcaagatgaccgccaaggtcctcaagcaactgatcgacaagaccggcattcccttcgtcaccacccagatgggcaagggcgtggtcgacgagcgtcacccgcgcttcctcggcaacgccgcgctgtccgccggcgacttcgtgcatcgcgcggtggaggcggccgacctgatcgtcaacgtcggccacgacgtgatcgagaagccgccgttcttcatggttcgcggcggtaccgaggtgatccacgtgaacttccgttccgccgaggtggacccggtgtatttcccgcagatcgaagtggtgggcgacatcgccaacgccatctggcagatcggcgaggcgctggacgataccgcgcactgggacttcacccgcctgctggcgatccgcgaggccaacgaggcgcaggtcgccgaaggcgccgacgacccgcgcttcccgctctacccgcagcgcctggtggccgacgtgcgccgggcgttgccgtcgcagggcatcgtcgccctggacaacggcatgtacaagatctggttcgcccgcaactacaaggcgcacatgcccaacaccgtgctgctggacaacgccctcgccaccatgggcgccggcctgccctcggcgatggccgcgcacctggtctacccggaccggccgatcgtcgcggtgtgcggcgatggcggcttcatgatgaacagccaggaactggaaaccgcggtgcggctgaagatgaacctgacggtgatcatcctgcgcgacaacggctacgggatgatccgctggaagcaatcgaacatgggcttcgccgacttcgggctggactacggcaacccggacttcgtgcgctatgccgaggcctacggcgcccacggccaccgggtcgacagtgccgagggcttcctgccgttgctggagcgctgcctgggcacgcccggggtgcatgtgatcgattgcccggtggattactcggagaacgaccgcatcctcaacgtcgagctgcgcgaacgcgccctggcggtctgaaccgccggagcgtcgcgccggcgtgcgttccggcgcgacggctcagaacagcgacaggttgtagctggcgatcaggcgcacctcgtccacgtcgcgcgccgagcgctcgaagtcggtgcggtaggtggcgttgcgcaggcgcaggctgaggtccttgaagcggccgctctgcaccacgtacttcagctcgatgtcgcgctcccattccttgccctcgtcgccgttggccaggcggatatggtcgccgttgacgtagcgggtcatgaagctcaggccgggcacgcctacgctgcgcaggtcgaagtcgtagcgcagttgccaggagcgttcctcggggttggcgaagtcgttcacctgcaggtagttggccaggtacggattgctgccgtcgaggtagggcatcgagctggcgccgttcatccgctgccagccggcgctgagcgtgtggccgccctgggcgtaggcgagcagcaggctgagggcgcggttgtcgatcttgccggcgcgggccgcgccggcgtcctcgctgtcgaaccagcgcaggtcggcgctcagcttgccggcgccgacctgccgcttgcccacggcaccgaggtagcgctggcgatagacgttgcgcaggccgccctgggcgtattgcagcagcaggccgtcgttgacctggtagtcgagttggtaggcgtcgaagcggttgccggtggtgtcgcaggcgtagcgtttgttcttgcagtgcaggcggatgtcctgggcgtcgctggagtcccgcgcggtgtagcgctccaggcgggtggcggagaacctgagcccggcgatctcctcgctggtcagctgggcgccgtggaacagggtcggcagcaggcgtccgtcgttgtatttcagcaacggcatgtccggcagcatcgccccgtacctgaactgtgtctgcgagaagcgcatcttgccggcaacgccggccttggcgtactggtcgaccgagcgacgcggatcgtggccgctggaaggcagcaggccgctgttgctgtccgcggggctggagtcgagcttgatcccgagcatcgccagggtatccacgccgaagcccagcgcgccctcggtatagcccgagcgcaggtcgaggatgaagccctgcgcggcttcctcgcgcttggaggcgccctgcgggttggccgagctgccgtcgcggaagtcgcggttgaagtagacggtgcgcgcttccaggcgcgcgctgccgtcctcgaggaaggcggcaggggccggggcgacgaatccgccgcacagggcgagggcgcccaggccgcgaagggtgcggggcgaacggggggaaaacggggaggacatgcggtgactctcgacagcgggggtaaaaaagcgcgcgaaggtgtcacagatggccggcggggtctttgcgaccttggtctagccgagaaggcgcgcacggatcgtcggccaggcaggcctctagcgggtcggacgcagcgtgccgaaagcgacgaagaatcctccgcagccccctgtgaaacgctgccccgcccgtgccagcctgatcgtcacgtttgcgccaggatatccggaggctagcgcttcacgcagacgaacagggcattcccggagctgccggcccagggcgtgatccgttcgtagtcgtgttcgaagacctgcacctcgaaatgcgtctgcaacaggtgctgcagctcggcgaagccgagggcgaccatggggtgttcgtcctcccaggtctgggtcgttccgtccgtggttttctcgataccgaggcgcagcgcctggcgctcgccctcgccgctgtagtaccagccggaaccgaaggtgaagcggctgcctcgatgctctacggaatggcggacgaacgcgcgattgtcgatctgccccttgtccaccgtgttgaaacagaacacgccgccatccgccagtgcgccatgcacgctggccaggcatgcgcgcaagcgctccagccctgcgttgtagtggatcgaatagaggaaacaggtgatcaggtccagcggctcgtccacctggaagccggccatgtcctgccggctgaagtgcgcttcgggacagcgctgtcgggcgaggtcgagcatcggctggttgatgtccaggccggcgctgcgatagccgaaatcgaggaagtgccgcacgtgagggccggtaccgcaggccaggtccaggtgccgccggccctggttgccgaacaactggtgcaggcgacgcacgcagtggctctgcgcctggtagtcgatgtcggcgcacatcaggtcgtaatagtgggacaggtcggtgtacagcgcggtggcggacatgggcggcaaggatcggcggcgaagggcgcggcatggtaccccaggcccaggccttgccggcgaaaaaacaggcgccggctggcggatcgcgggcggacttcagtcgaaccgcggccagtcgtcggctatccggtaccagcaggccatcgatgcgacctggacatgcttctgtttcgccgccgggaagggcgtgtccaggctgccgagggcgaccgatacccagtcggcgaactcgccttcgctcctcgaccagaacagcggcgagccgcagcgcgagcagaagcgccggagcacggcgggtgaggagcggaacgcggcgagcaggtcggcgccgcggtcgatgtgcaggtccgcgacggggacgctgccatagctggcgaatgccgcgccatgggccttgcgacactggccgcagtggcagtgagagagtgcgcgcgggggcgaggacagtcggtagtgcagcgcgccgcacaggcaactgccgtggaaggtctggctcatcggagggcgttcccgcattcgcaaaggcggcgagtcaagcagccctcgccacgcttgtcgagcgcctcctccggtcgcgggctgtcggtgcgggcgtcgatgtctgctaggctctgccgtttcaccctaggagtatttccccatggcccgagccactgcccgccacatcctggtttccagcgaagccaagtgcaacgaactgaagaccgccatcgaaggcggtgccgacttcgccgaagtcgcccgcgagcattcctcctgcccctccggccgcgacggcggcaacctgggctcgttcggccccggccagatggtccgcgagttcgaccaggtggtcttcagcgcgccgctgaacgtggtccaggggccggtgaagacccagttcggctaccacctgctggaagtcaccagccgccaggactgaacgtacggcggcgcataacgcccctcttccacgcgccgatccaggcgtggggcgaataaccgctgcgcgggatagacggcggataacgccgttggcgttatgcgccctacctgtcccggacgacgaaagaagccgcacttccaggtgccaatccgggcgtagggcgaataaccgctgcgcggttatccgccggtgcgcgatcgatagcctggctggcctcagggcgcgaagtagcgggagatctgcgaatagacgccgctgaaatcggagaagtagtcattgcgctgtgaggtgggcgcgccgcagtacgaggggccgccgtacaggccaccgcgcagctggtaggagccgtcgccggcgacggtcagcaggcccgagccggacgagccgccttcgaccaccgccgacggccagtcgacgcgggtcagggcggtatgcccgtcgtaggtgacgcccactgccgagacgttgccctgcgagtacttcttggcgtcgccgcgcggatggtggatgtcatggccgagcgagccgttggcgatcggcgtggcgctccagccctggtagaacacgccggccggcggagtgcgcttgagttccagcagcagggtgtcgcgcttcgcgtcgcggtgcaggatattcgccccgccggtcagcacggtgacgctctggttgatggtcgaggcgtcgccgtagcactgggtggtgttgtagaaccagatggtctgcagcgtcgcggcggtggcctggtcctcgatgcagtgcgcggccgaccagaacaactggcgcttgggcgagttgccgttgttcagcagggtgccggtgcagatgtagctgccgccgtccgccgagctggtgaagaccatcttcgccaccgctgcggtggcgttgtcgtaggcccgcgtgccgctctgggtcgcgcagaccgcatccacctcgcagctgccgctggcgccgaagccgtcgcggtagccggccttgtacagggagtcggcgaaatacgatacctggggtaccgacaggcgcaggtcgcccggttgcaggttggccggcagcaccagttcgacggtcagggtatcgccctcgatgaccgggctccagtagggacggttgaccgagaggtccttgccgctggcctcgaagatttccttgccggcgccggcgaagtgcagcagcacgtcgtcgggcagcgagccgctgcgggtttccaggcgaatcgcggcgcgcaggctggcggcccccgcagcgctgatcgggaagcgcgcggtgtggcgcccgtccggagtgtcgatccattcgagggttgtcaggtcgatttccggagtcgccgttttcaggcccacccccacttgcagcggcgtacccggtttcggcgccagcggcgcggcgcgggccacgcggcgggcggggggcgcggcgaagtggatgccggccgccgagatcgccgcgttggggttggcgaagcgggcgtgaccggtgctcgccggggaggcctggagcacggcgacgtcgccagccatctcgctcgcaccgggcgccgccaaggcctggctcgcgccggcagccaacgccagaaccaggcatgcattcaggtacgttctcttatgcatgaatcgactccttcagttttttgggagggcaacttcctcaatcgttcgcgtggcgaaagatatgcaggtgtgacggagtcgttcaaatattttttatattcgtttctgctagctattaaatatgaagaagcgtttatggatagcagaatagatagctatttccttcacttgccattgatgttggattgctctctctaccaactaaagtttggtctggagtggctctgcagagccttcggtttgcttcagagaggtgcaggatgtagtgcgtgagtgctttactggtgcggctgtcgatgtgatcgggttaacgaaatcctgattttcaagttatccggtttgaccactgccgaatataaggctgggtgaatcttccattcaccgctcggaaaccgttccgatgttggcttggttgaattccaggatatccggcttatggtcgtataagtcatctctataatcgcggggcatatatagagccctggccgcttaccattactccagggttttccaggatacgccgccgcccttgtttcagagcggcggatgcaacggcggcgcatgccgcgcgatcagttcggcgacccactcgatgaacacccgcagcttgccgctgacgtggcggttcggcgggaacgccaggtacagcggcatcggctccaggctccagtcctcgaacagcggcagcagctcgccgcgggcgaggggctcgcgcgccatgtagtgcggcagccagaggatgcccaggccggccagcccggccgccaggtaggcgttgccgtcgtccaccgccagcacatgacggcccgccacccgcaggcattccccgcccctgcgcatggcgtagggcagggccttgccggtgcgcgcccagaggaagccgacgatacgctggtggctgtcctccagttcgcgcgggtggctcggcacgccggcgcgctgcaagtaggccggtgccgcgtagacccccagttgcaggtcgccgacccgccgcgccatcagcgactggtcgcgcagttcgccgccgcggatgacgcagtcgacgttctcgtcgatcaggtcgacgagccgatcgctcacgcccaggtcgatctggatctccggatagcgcgcatggaactcgggcaacgccgggatcagcagcagccgcgccagcgggctcggtacgtcgatccggagacgcccgcggggcgccagggcggcgctggagaggctggtctcggcatcgtccagttccgccagcaggcgtaccacccgctcgtagtaggcggcgccgtcggcggtcaggttgagcttgcgcgtggtgcggttgagcaggcgtacccgcagccgcgcttccagttgctggaccaactgggtgacgctggtgcggctcatgtgcagcgtctccgccgccttggtgaagctgccggtatccaccacacgggcaaaggcctgcatcgcatcgaaacggtccatcgggactccgggtcgtcggggattgtttggattctacaaacagtcatggccagggttgcgcgtttatccacggcgcgcacgaccttaccgttcttccatcgacgatgacggggccgggagccccaggatggaggtatcgcatgactgtacgcgacgtggttttccccgctggccgccaggccctctacgagcgcaaccgctattccccggcggtccgcagcgacggcctgctgttcgtctccggccaggtcggcagccgcgacgacggctctcccgaacccgagctggagacccaggtccgccgcgccttcgacaatctgaatgcggtgctcgccgcggccggttgcgggttcgacgatgtgctcgacgtcactgtgttcatggtcgacgccgaggccaacttcgagcgcatctggaagatcgtcccggagtactggggcgaggcgccgcaccccacgctgacggcggtgggggtgaactggctgtatggcttcagcttcgagatcaaggtggtggcgaggttgccggaggggcggtgagagccgatgcgcagtgccggggccagctcggctagcgccggggctctgagggacgccgcaggcttacccaggccggcgcgtggtcgctggcgtgctcctcgccgcgcacccagcgatccaccccggcgtcttccaggtggtccgccaggctggcgctgagcagcaggtggtcgatgcgcagcccggcgtcgcgttgccagtgctggcggaagtagtcccagaaggtatagaggcgccggtcggggaaacgctggcgtagcgcgtccacccagccctgccgcaggaggcgctcgaagcactcgcgggactccggctggagcagggcgtcctttttccaggagcgggtgtcgtagatatcgaagtcgctgggcaccacgttgaagtcgccggccagcaccaccggatggccgctctccatcagctcggcggcgtgtcggatgaggtgctcgaaccaggccagcttgtagtcgaacttcggtcccggctggggattgccattgggcaggtacaggctggccaccagcaggccgtcgacggccgcttcgaggtagcggctgtggggatcgctggcgttgcccggcaggccgcggcgtacctccagcggctggctgtcgcgggcgaggatggcgacgccgttccacgccgactggccctgccagatcgcgccgtatccggccttctccagcgccgcggcggggaagcgcgcgtcgggcgtcttcagttcctgcaggcagacgatgtccggcgcttcccgctccagccaggccagcagcgcggccagccgggtctggatgccgttgacgttgaaggtggcgatcttcagggtgtccaccggtcgcctccgcgaatgacgatcaggcggccgcctgcagggcttcgccgatggcttcgttgaacgcctgcaagtcacccgggttgcgcgaggtgatcagggtccagccgttcgccgggcagactttcacccgcgtgtcgacccagtccgcgccggcgttggtcaggtcgatacgcacgctggaataggaggtcagggtcttgccgcgggcgacaccggcgtcgatcagcagccaggggccgtggcagatggcggcgaccgtcttgcctgcgtcgctgaattccctgaccaggcgccgggcctcgctgtcctggcgtagggtgtcggcattcaccgtgccgccggggaccagcagcaagtcgtagtcctcggcgcgcaggccttgcagcctggcgtcggaattgacgatcaggtccttctcgctgtcgtgcacccaggtctgcgcttcgccgccctcgatggtcgcgtgggtgaccgtggcgccctgttgcttcagggtcttcagcggttcgagcagctcgtcgcgctcgatgccggtgttggcggtgatgaccaggacgttcttgccttgcagcttcgcgctcatggttttctcctctgctggggcgcccgtggcgggcgccgtggcgtgacatgcaggagagtggaaagctggagcgccggggagttcgaaagatttgccgggcggtgggccggatccttggcctgtcagcctccggcgtcagcggaacagcagcgaatgatgcgccgcgccaccggtgcgcgcgccgtcgcccaccgcgatggcgacgttgccggccgccagcgccgcgtcgccgcaggcgaagacgccgggaacgctggtttcgcgcatgccgtcggtcctgatgaacggcccgctcgggccgtcctcgaactcgcagccgagcaacgccgccagcgggctggccatgcgcgtacgcggctgggtgaacaaccccgcgagcgtaatcgtgcggccactggccagggtcacgtcggcgcgcgcgccgcccagcgcgaccacggcttcgcgctcgatcgccacgccgcgccggtccagcctggacatttgctcggcatccggttcgaagacgccgttgaggaagaaggtggtcgctccccagtcgggcaacatcagggcgtggtggatggccagcggtgaggccgccagtacgccaatcggcccgccgtccagttcgtagccgtggcaatacgggcaatggaacacgtgccgtccccagcgctcggcaagaccggggatctccggcagctcgtcggcgaccccgctggcgaggatcagccggtgcgcggtgaagcgttctccgttggcggccttcaccacgaaaccgtcagcctccttcttcgccgcgacggcggcttcggacagccactcgacgctgggataggccagcaactgggcgcgggcgtcatcgacgatggccgccgggtcgcggccgtcctggccgagaaagccgtgggaggcccgggcgaagcggttgcgccgcagtcccgtgtccatcaccagcaccctgcgccgcgcccgcgccagttgcatgcccgcggagatgccggcgtagctgccgcccacgatgatcacgtcgaaagtcatggcgtatctcccattcggatagtcacgcaacaacgtaagtttcatgaacggcgtttgtcaacgctctcgtaactttttctgtagcgagagatactcatggcttttccgtctccacgagtccgccgtccatgagaaacgacacccgcctctcgcgcatgctccatgtgctgatccatatggcccgccacgaagggccggcgacttccgaagccatcgggcagatgctcggcaccaacccggtggtggtgcgacggaccatggcgctgctgaagaacgaaggctacgtgagttcggagaagggccatcgcggcggttggcggctggccaagccgctggcggacatcaccttgctggatatccaccaggcgctgggagcgtcctcgatcttcgccatcggcctgtctaccgatcatccggaatgcctggtcgagcaggcggtcaacgaagcgctcggcgaggcgttcgaggcggcgcaggcgttgctcctggagcgcctggggagcgtcacgctggagcagttggcgagcgagttcgagcgccgctatcggccctgctgaggcgcctcgaagggccgttcggacaccgccgccgcgcctgcggaggcacgccggcggtccgggatcagagcgagtacttcaccgtgaacatcaggttgcgcggctcgccgtagttgaggttgccgaagtcgatgccgctgtaatagtacttgtcgaacaggttgttgaagttcagccgtgtgtcgatccgttcgctgaccttgtagccgagcatggcgttgaccacggtgtagccgccctgctggaaaccggtgctgctgtcctcggtcttgctctgggtggccaggtcgccgccgacgcgccatttgtgcagttcgccgggtagcgtgtagctggtggcgagcttgaacaggtggcgtggcttggccgcgtcgaatggcttgccctcgttggccttgttgctgtcgtgcttgtacttggcgtcgacgtaggtatagccggccatcatctgccagtcgtcgctcagcgcaccgctcagctccaggtcgacgccctggctgcggaccttgcccgaagcgcgcgagcaatagcgcgaggtggggctgaaggggcatggcgaggggccgccgacgtcctcggtggcgcggttttcctggtcgatctggaacagcgcgatctgcgaattgagcgcgccgccgaagtgttcgcccttcaggccgatctcgtagttcttgccggtgatcgggtcgagcaggccgccgccggcgtcgaagttgctctgcggcttgaagatgtcggtatagctggcgtagaccgagtaggtctggttcaggtcgtagatcaccccggcatagcgggtgacgttgcgggtgaccttgtagctgtcggtatcggcgtcggccttgtaccagtccaggcgcccgccgaggatcactttcagcgggtcggcgaggttcaaccgggtggtgaggtaggcgcctttctgttcctggtcgagcttcatgccccacaggctggtgttcagcctcggcttgagagtcgagctcgggtcccactgggtcgggtccatcggcccggtgggggtgccgtccttgttgaacaggctgccccagccgccgtggccgtcgaagcgttcctggcgatagctggcgccgaccaccagctcgtgctcgcggccgagcaactggaagggaccgttggcataggcgtcatagctgtcgtggtcgtcggtgtagctgtagtcgccggggttctgggtcatgctggcgcagccggtggtcgagtagtagcagtcgttgtacagcccgagcatgttgattcgcgcccacagcttgtcggcggccagcttcatctgccaaccgttggcgaagcggtgggtcaggtcgctgaacaggtgggtggtgtcggtatcccagtaggaccagtcggcgccgtaataggacgagcgcttgaggtccaggtggcggccgcccagcgggctgggcaggcctacccagttgtcgttgcggttgtcgttctggttcgaggcgccgatggcgaaggtggtgtccgggctcaggtcggcttcggcgatcccgtagaacacgccgcgttcgctgctgacgtggtcctggaagctgttgcctttctggtaggcgaccaccgcgcggccgcgcagggttccttcgctgttcagcgggccggaaacgtcggcctcgctgcgatagcggtcccaggtgccgacgctgccttgcagggaggcacggaagtcctgggtcggacgcttgcgcaccatgttgatcgccgccgccgggttgcctgcgccctgcatcagtccggtggcgccgcgcaccacttcgacgcggtcgaacatggccaggtcggcggcggaaatgacgtcctgggtataggtggaaatgctcgtcggcaggccgtcgtacatgatgttgtcgacgtcgaagccgcgcgccgcgtacttcacccgggccggcccgtactgttgcacggtgaggccggtgacgcccttcaccgcgtcgttgaggtcgcgcatgccctggtcgtccatgcgctggcgggtgaccacgctgaccgactgaggggtctcgcggatcgacatcgccagcttggtcgaggtgcgcatcgcccgcgtggtgtaggagccgctgtcttcggtgatggcggcggtggccgggtcctgggtggcgaccacgctgagcgcgccgaggtcgacgctgtcgccgggggcgatgccggcacctgtcgccgcggcctcgacccaggcgtcgccgccccgtacctccccgctcagtccggaacctgcgagcagacgctgcagtgcctcgcttggctccagcgtgccgcgtagggccggtgcgcgccggtcggccacggccgcgcggtcgaaacggatgcgcaggccgctggcgccctgcaattgctcgagggatgcggccaggggctgggcgggaaggtcaagggcgatgggagcggcctgggcggccagggaaagcgaggagagaccgagcaataacgcactggaaacgacgtgtttcatctgcagtgtcctggatggcggcgcaggcaggccgttggcgcgaccggctgcgtttcttgtttatgtgggaaaccggcgtaggaattcgcggcggggcaagtgtatgtaaatgtaaaaatgtagtaaatgatagagattatcgttatcagtagtattctcaggaatccgatgaactgcgtcctgccagcggctgacggggatttccgctggatacctcccgtgaaggccgtctggattcgtgactccagcgcaaatgaatttgctcgattcgggtcttaatcgaagagatgtaagccgccacactgcgcttcattcgagccatcccgcccacggagcgcagccatgtcgtccaccatccaccccctcccgtccttcggtctcggcaccttccgccttaccggccaggtcgtcgtcgactcggtgcgcagcgccctcgaactgggctatcgcgccatcgataccgcgcagatctacggcaacgaggcggatatcggccgcgcgatcgccgagagcggcgtaccgcgttccgagctgttcctcaccaccaaggtctgggtcgacaactacgcccgcgaaaagctgctcgccagcctgcgcgagagtctggagaaactgcgcaccgaccggttggacctggtcctgatccattggccggcacccggcaacggcgtcgagctggcggagtacatggcggcgctggcggaagccaagtccctgggcctgacccggcggatcggcgtctccaacttcaacatcgaactgacccgccaggccatcgccgcggtcggtgcgggcgagatatccaccaaccagatcgaactcagcccttacttgcagaaccgcgcgctgaccgcctacctcgaggagcagggcatcgcggtcacctcgtacatgaccctggcctacggcaaggtgctgaaggacccgacgctggccgggatagccgccaggcaccgggccacggtcgcccaggtggcgctggcctgggcgatgcaactgggctacgcggtgattccgtcctcgacccgccgcgagaacctcgccagcaacctgctggcgcgcgacctgcgcctggacgccgaggacatggcgcgcatcgccggcctcgagcgtaacggccgcgaggtcagtccgcagggcctggcgccggcctgggactgagaaccgcgtcgaaggtccgccgcggtgcatgagcggggcggccgaggctccggtcgcgcggccggttcagagctcgatgcggtattcgatcacccccggcttgtccgccacccagtcgtacaggcgctgtgccctgtggttgctttcctgggtatgccagtagagccgcgcgcagcgacgttcctcggcctgccggcggacgtactcgatcaactgcttgccgatctgctggccgcgcacgtcgggcgagacatagaggtcttccaggtagcagacgtcctgtgccgcccaggtcgagcggtggtagaggaagttgacgatgccatgcaggcggctaccgtcgctggccacggcgcagtgcatcggttcgccctcgtcgaagaagcgccgccaggtggcctcggtggcctgtgccgagagttcgacttcatagaacgcctggtaggccttccagtattcgagccactgctcgaagtcctcgtgtgccacggggcgtaccgataccagtgtgtgcagggattgcatccagtgcttccttctttggcttgatggggcgatccggcggaggccgggaccgagggtcttgacccggctgtttttatagccgcctaatggcttgccataccccaccaattagataatcgagggcagaccatttgttcaggcagtcactgctcgagtcggtcaaggcgcgcctcctccatccacagctccaggccctgccgctgcatgcgcgaatccagcgcgcgatccgccaactgatcctcgacggtgcgctggcgccgggcaatccgttgccggcctcgcgggcgctggcgcagtcgttgggggtatcccgcgacaccgtcgaagcggcctattcgcacctgcatgccgagggcttcatcgagcgtcgggtcggcagcggcagcgtggtcgccgcggctacccggctgtcccccggccggcgcggcgcgggcgctccacgacggggcggcggcgcgccgcgactgagccggcgtggcgaggcgatgcaggctggcggcggggttcgcgagcagctcgtcccgcgccccttcgctcccggcgtgccggagacccgcacctttcccctggcgacctgggagcgcctgcagcgccaggtcctcaaggaatacggcgcgcgcgccctgacccatggcgacccgcagggtgccgaaccgctgcgccaggcgatcgccgactacgtcaacctggagcgtggcgcacgcgccacggccgaccgggtactggtgctgaccagttcgcaacaggcgctgggtctttgcgccagcgtgctgctcgacgccggcgagcggatattcgtcgaggacccggcctactacggcgcgcgcaaggccttcgaggccgcaggcctggagtgcctgccggtcccggtcgacgaacagggcctgcggcccgagccgatcctcgcccagccgcaggcggcgcgggcgctgtgcctgaccccgtcgcaccattacccgaccggcgtgaccctgtcgctggagcgccgcctggcgctgatcgaatgggcgcagcggcagcaggcatggatcatcgaggacgactacgacagcgagttccactacgccggccggcccaccgcctgtgtgcaaggcctggacgcccacgagcggacgctctacatcggcacgttcaccaagtcgctgtttcccggcctgcgcatcggctacatggtcctgccgccggcgctggtggcgccgatgaccgtcgcccgctccctgcaggacgggcacaacgcctcgctggcgcaactgaccctggcgcgcttcatcgccggcggccatttcggcgcctatgtgcgcggcatgcgcaatctctacggcgagcgcctgggattcctcgcggagcgggtgggcaagcgtctgggcggcctggtcgagccgcgcgtgccggccggcgggctacagatgcccgggctgctttgcgcgggaatcgacgaaacgcgcgccatcgcggcggcataccgcgccggtgtcgagctggtcgggctcagcgccctgcatctcgccgcgccaccgcgagcgggtttcctgatgggcttcgccgcctacaccacggacgagctggaggcggcggtcggggtcctcgcgaagaccctgcgcggtttgcgtacgaatccctaggccgccggcaagcgctcagtcgcgcagggcgtagacgtaggcatcgacctgggcgccgtcggccagcgttacccgggtcgccacgcgccggtattcggtgccttcgaattcatccagcgcgggccagtgctcggcgaggcggtcggagacgaacacatggccgtggatttcctcgccgtcggcgtcgatcgccaggcccggaaagcccatcccggcaccccagcccttttccagcaggcgaccgcggaggctggccgcctgccattgcccgccgatcttctgcatcaggtgttcgttgggacggccggggccgaggctgccgtagacgaagagtcgctgcatcgataactcccttgaacggaagagcgtgggcgcaagacgcgaagccttccgcccgcgcctttcacttgcttgccagcggtggagtacgcggcggcacgatacgccgcgagccggtcgactcgaaggccgcggcgaagcgcagcagcgccgagtcgtcgtaggcgcggccggcgaaggtcaggcccaccggcatgccgatgtcggccatcacccccatcggtacggtgaccgtcggcacgccgaggtggcggatggcgaggttgccgttggcgacccagacaccgttgctccaggcgatgtcggccgaggccgggttgacgtcggcgtccgccgggccgacgtcggcgacggtggggaagagcacggcgtcgaggcgcaggcgtcgcatccactcctcgaggtcgatccgccgggtttcctcgaggccgcgcaggccatcggggagggtcgcgatccggtcccagggctttatgccgcgctcggccatccgcacgtattcgtccatgccggcggccaggtcgccctcgcggttgggcagggtgccggggtcgtgggggaagatctgcgggccgtcgacatccgccaggcggttcagcttcggatcgccattggcgcgcaggaagtcgtcgaagccccaggccgagagttcccacagctcgtcgtggaggaattccttcgacaccaggccgcggttgaacacggtgggcgcgccgggtcggtcgccctcgcagttcgacaccagcgggaagtccacctcgatcacttcggcgccggcggcttccagggccttgcgcgcctgttcccagagggcgatgaccgagggccgggtatggatgcgctggccggtcgggccgccgatcccgggggactcgctggtgcccgcatcggggtcggcgttgatgaacatgcgcggcacgccgaagcgcttgccggccagggcctcggcgcctgcggccagggccgggtagctcgccgggcgtacctcggaggccttggggatcggcacccagggctgcatgcgccagaggtcgccgcgagtatcgggatcgtcggcgaccactacgtcgaggatttccagcaggtcggccatgctccgcgcatagggcaccaccacgtccatggtcggcgtcagcggccagttgccgcgcaccgagatcaccccgcgcgaaggggtgtaggcgcacaggccgttgttcgacgccgggccgcgcccgctcgaccaggtttcctcggccaggccgaaggcggcgaagctggccgcggtggcggtgccggcgccattggaggaccccgaggcgaagggcgcggtgaggtaggcggcattgtacgggctctccgcgcggccgtagacgccgcgctgcatgccgccgttggccatgggcggcatgttggtcttgcccaggcagatcgccccggcggcgcgcaggcgctcgacggtgaaggcatcgcgctgggccaccaggtccttgaacgccgggctgccggaagccgcggtgaggcccttgaccaggtagctgtccttggcggtgtagggaatgccgtccagcggaccgaggggctcgccacgcgcccggcgggcgtcggaggcctgcgcttcggccagcgcatcgggattgcgcaccaccaccgcgttcagcgcggtgggcgtgccgggtgcatcgtaggcgtcgatccgcgccaggtaggcctggaccagttcgaccgccgtggtacgaccggactcgagcgcgtcacgcagctcggcgatggaaacctcggtgacctcgatcatgctgtcaccgcctggcgaatggagacggggagaccgttagcgacgctcatcatcgttcctcttgttctctgcttgctgcgacgggggccgcgaggcggccgggtcgatacaggggatgcagtgtacatcctggccggcgctcgcggcttccctggcggggcgcggcaacggcctcgcaggtcctggccagtgtctggggttgccgccgaagcgcggcgtcggagaaagtccgcgggctgtcgccggccgccggcgaggcgtaaggtgcggcgtcggggggaccatttcacacaggggaatcgtcatgacgaatcatcgtaccgcgctggtcaccggcgccacccgtggcatcggcctggccctggccaggcgcttggcggcctccggctggagtgtagtgggcatcgcccgccatgcgagcgacgactttcctggacgtctgctgtgctgcgacctggccgatcctgcgcaaaccgccgagacgctgcgcggattgctctcggaaagcgccgtggatgccttggtcaacaacgccgggatcgccttgccgcaaagcctggagaacctcgacctggccgctctgcaacaggtcttcgacctcaacgtgcgggtcgccgtgcagcttgcccaggcctgcctgccggggctcaagcgttcgccggcgggccgcatcgtcaacctgtgcagccgggcgatccacggcgcccgcgaacgcaccgcctacgccgcggcgaagagcgcgctggtcggggtgactcgcacctgggcgctggagctggcgccgctgggcatcacggtcaacgcggtggcgcccgggccgatcgagaccgagctgttccgccagacccgcccggtcggcggcgaggaggaacggcggattctctcgaccatccccatgcagcggctcgggcggccggacgaagtggccgcgctgatcgagttcctgctcagcgagggcgcttcgttcgtcaccggccaggtgatcggtgtcgacggcggcggcagcctgggcggtcgttgaggccggggcttcagatccggcggctgcgcagcagtagccagagcaggtagaaaccgccgagcaggccggtcatcaggccgatcggcaggttggcgacgtatgccaggcgctggccgagcaggtcggcggccagcagcaggaccgcgcccatcaatgcgccggacagcaacggcaccccggccgagcgggtcaggcgccgggccagttgcgggccggccagggcgatgaaggcgatggggccggccgcggcggtggcgatggcggtcatgccgacggcgaccatgaccatctgcaagcgcacgcgctccaccgccacgccgagctgggcggcgctggcatcgcccagctccagcacttccaggcgacgaccgtggtacagcgccagcggcacgctggcgagcaggcccagcgctgccgggacgacgtgcgaccaggtccgggtgttcagcgagccggccagccagagctgggcgtacatcgcctggtcgaggttgccggtgaccagcagcaggctgttcagacccgacaggctggcgccgacaccgatgcccaccagcaccaggcggtagccgccggcggtggcgccccggcgcgccagcagcaccaccgccagcgccgtgcagaggccggcggccagcgccgccagcgaggtggccagcgggccggcatcgaacaggatgatctgcacgatggcgccgctggcggcgccggtggtgaaaccgatgacgtcgggcgagcccagcggattgcgcgagatcgactggaagatcgccccggccatgcccagcgcggcgccgaccaggcaggcggtgagcacccgtggcaggcgtacgcgctggacgatgcgctgggcggtggggtcctggccctggccgagcaggctggcgaacacctctgccgggcccagcgccaggctgccggtccccagcagcgccgccgccagcgccagtccgacccccgcgaggaccaggcaggccagcgccgcccgtggccgccaacgcagcgacagggagcccaggcgcagggcgtggagaccgttcacaggcggctcaggcggaagcgcctgaccaggacgatgaaggccggtccgccgagcagcaaagcgacgattccggcggcgatctccgccggcgccgccagcagccgcccgaggatgtcggcgccgagcagcaggccggcggcgatcagcgccgagaaaggcaggatccagcgctggtccggtccggccagcagtcgcgcgaggtgcggggcgaccaggccgacgaaggcgatcggcccggccagggcggtcgccgcgccggccagcagcatcaccgccaggcaggcgagcagccaggtcaggcgcaggtcgacgccgagcgcccggccgatctcctggcccagggccagggcattgagcctggcggcgagggcgaaggcggcggccagcccggcgccgatggccaggcccggccatccgagcagggcgaagccgctgccggaaagcgagccggcggcccagtggcggaagcggtcgaagacttccggcggggcgttcagcacgatgatcccggtcagcgaggcgagcatcactgacaagccggcacccgccagcaccaggcgcaccgggttggtgccggtctcgcgggcctggccgagaaggaatacggcgatgccggccaggccggcgccgaggaaggcgcaaccgaggtactggcccatgctcgccaggtcgaacagcgcgaccccgacgatcaccgccagcgccgcgccggcgttgatccccagcaggccgggttcggccagcggattgcgcgtcagcgcttgcatcagcgcgccggccactcccagcgccgcgccggccagcagcgccaccagggtgcgtggcaggcgcagttcgcgtaccaccaggtggcgatcatcgtgcggatcgacggcttgcagggcgtccagtgtgaccgccaggggcaccggccgcgagcccagcgccaggctggccagggccgccagcgcgagcagcagcgcgccggcgagcaggccccaggcgcgcaggcgccggcggcgcatcggggacgcctgcatgagcggacttccggcgaacgggcgcatggctcagcggaaatggcgggcgacgttgtcgatcatctgccgtcccgagtagtagtcgatgcggaaggaactggggcccagggcgtacacgcgcttttcgcggaccgccgacaggttggccagtaccgggtcggcgaggaacgcctgcacgtcgtcgtcgctggcgccgagcaggaacacgctgtcgccggcgatggcggcgggcaggttttcccgcgagatgaactggaagtccgaggcgcgcgtcaccttgcccgccagcgcctccggcagttccgccacctggaagccgagggcctcgagcaggcgtgcctgggggctggcctggcggccgatggaatagctgccggcgatgttgtagccgaccacgctgaccgggccctgcggcggcgcgatggccgcggcgacttcggcggtgtaggcgtcgaagcgctggatggcggcctgcgcctggcgttccaggccggtgtgccggcccagctcggtagccagttcctgccagctgtgtttcgagtagtcgaccaccagcgtcggtacgccctgcgcctccagctccgcacggtatggcgcggcgctgtcggcgccggtggcggaggcgaccagcaggtccggatcctgggcgatcaccgcttcgatgtcgaagcgcaggttgcggtagagcacctcgacgccacgttggtcggcgaccttcgcccattgcgagaagaagcccttggcgtcggtcaggcgacttggcgtggtggcggcgctggccaccagcggtgcgtccatcgccagcaggatgccggtgacgctcggggtggtggagacgatccgcgccggcttcggctccccggccgcggcgagggtggcgaacaggctcagggcgagggcgagtaacggcagggcggagcggcggcgggtcggcatgaaggctgttttcgctgtaggggacgccgggcggacggattcatatgataatgcttctcatacagtctattccataatgtagaatcgattccacatattcgagccattcttatccaggaacctcccatgacccatcgcctgcacgcggacgccgtgaccttgcgccgcgacgcgcggaccgtttcgcggaatctctcgctggccatccccgagggttcgttcagtgtgatcgtcgggcccaacgcctgcggcaagtcgaccctgctggcggcattgtcgcgcctgttggcgccggccgagggccgggtggtgctggacggcagggatatccacagcctgccgggacgggaagtggcgcggcgtctcggcctgctgccgcagagcgcgctggcgccggatggcatcacggtggccgagctggtggcgcgcgggcgctatccgcaccagtcgttcctgcgccagtggtcgccggcggatgagcgcgcggtagcggcggcgttacgcgccacgcgggtcgacggcctggccgagcgaccgctcgatgcgctctccggcggccagcggcaacgcgtgtggatcgccatggtgctggcgcaggaaaccccgttgctgctgctcgacgagccaaccacctacctggatatcgtccaccagatcgaattgctcgaactgctcgccgagctgaatcgccaggggcgcaccatcgtcgccgtgctgcacgacctcaaccaggcatgccgctacgcctcgcacctgatcgccatgcgtgacggcgcgatcctcgccgagggcgcgccggcgcatatcttcaccgagcgtctggtggaggaggtgttcggcttgcgctcgttgatcatcgccgacccggtcagcggcacgccgctgctggtgccgcgcgggatcgccgccgacgcgccgggctgaggtggctcagcgcggcggcggccgcatgccggggtggagtaccaggccaccggtggactggttgacctgcagcgcctcgtggaacagcgcgtcgcggtcttccgccgactgcaactggccgagatcggtcaccgtggtcatggcgcagacgatctcctgctgggcgtcgaacaccggcgccgcctggccggtgacattcgacagcaggtggctggtcagttcggcccagcagcgctcacgcacctcgtcgagcagcgcgcggctcggcgggctgccgcggaagtgcgccggttgctgcttgcgcgcggcgtcgaccacggccttcggcaggaaggcctggaacaccaggccgcaagcggtattgtcgatgggcaggatatcgcccagggccagcgggttgatcgagaaataggcgctgcggtaccagcgcaccagggtcgggccgcgctcggtccagatcgccaccccgccgctggcggcatgccgttgggccagggccttcatgtggcgggcggcgatatccaccgcgtcgatccgcttcagcgcgcctatgccgatgctcagcgccgccggcccgaggtcgtagagaccgctgagcgggtcctggcgggccaggccttccttcaccaggctctgcaggtagcggtgcgcggtggagccgccggtgccggtgcgccgggccacttcgccgagggccagctcgccttcggcgttggccagggtcttcaggaagcgcgcggcgatggacaccgactggatggtgccggagcgcttttcgcccggggcgtccggcatctcgtccgccgggggctgcgaagtattcaacggctcggtctcctcaccacggttgatccataggcttcggtccgcgctgcggtggcgcgggcggcgcccatgataccgattccccggggcggtggggcgccgcggaagggacgggtgtaggagatctcatatttcgcaatgaggaatctattccccattgaggaatgttctggtggcgtgatagcctgaatgtaaaagagagtcattcccatttggagaagatccttgaacgcccgcacgcaccgcacgctcaaccggggaatcggcgtcgtcacgctgtccaccctgctcgcctcgccatcggcactggcccgggaaaacccgcccgccgaggacgaacccgccgccctcgaggcgctggtcgtgaccggcgagaaacgtgaacgctcgctgaaggacacggcgtcctcggtatcgctcaccagcgcccgcgacatcgaccgcaagcagaccggcaacgcctcggtcgccgaggtgatcaatggcagtcccaacgtggtctacaccgactcggtgggcgcgccgatcatccgcggccaggacacccagggcccgaacaacgggcagaacgtgttctggggcggcacagtgccgcgggcgacgatcaacctcgatggccactacctgaactacaacgagatgttcttcggcgcgacctcggtctgggacgtcgacagcatcgaggtgttccgcggcccgcagaccacctcccagggcgccaacgccatcgccggggcgatcatcgtcaacaccaaggacccgaccttcagccccgaggctgcctaccaggcggagatcggcagctaccattcgcggcgcagctcgatcgcagtgtccggcccgctggcgcaggacttcgccgggcgcctggcggtggactacgcgggccgcgacaccttcatcgactacgacaacccgaagttccaggacagcggcaccgaccaggacttccgcgccctcaacgcgcgcgccaagctgctctggctgcccagcggaattccgggcctggagagcaagttcaccttctcccacaacgacagcaaccgtccgacccaggaagcggcgacccgcccgttcgacaagctcgaccatcgctcgaccaccatgcccagctgggagcaggacaccaacaccagcatcctcgacgtcgcctatgacctcgacaacggcatccgcctgttcaaccaggcgcagtactcgctgtcctcggtgcaccgcaccaccggcgcgggcggcgagggcgacgccgacatccgccagaagaacgcctccaacgaatcgcgggtcagcttcggcgagcaggaggaccggatcagtggcatgggcggggtctactacgcccgcacccgcaccgacgagacactgcacctgcgcgggctgtcggccttcgacgacacgaagaagaacctcggtgtgttcggcgagctgaactaccgcctgagcgaccgctggaccctgaccaccggcctgcgctaccaggaggatcgcatcgagcgcagcggcaactcggtgctggcgccgcgtccgctggactaccagaagaccttctcggccttcctgccgaaagtctccctggccttcgccgcgaccccggactggaccgtcggcggcctggtcagccgcggctacaaccccggcggcgtgtcgctcaacctgaccacccgcaactgggcctacttcaaggaagaaaccatctggaactacgaactgttcacccgcgccagcctgctcgacggccgcctggtgctgaacggcaacctgttcttcatggatttcaaggacgcccagtacaacatcccggtggtggtttcgccgggggtggcgcagtcgtacaccatcaacgccgagaaggcccacgcctacggcatggagctggacctcgactatcgcctgcgcgacgacctgcggctgaaggccagcgccggcgtgctacgcacccggatcgacgagatgtccggcaataccggctacgagcacaacgagttcgcccgctcgccgggctataccctcagcttcggaccgagctgggacgtcaccgagcgcctcaacctgaacgcccaggtgcgctacctggacggctactactcggacaccgccaacaccaaggcctactcgatcaaggcctacaccctcaccgacgcccgcgccagctaccgcttcaacgaccaggtgcagctctatggctacgtgaagaacgtgttcgacgaccgctcgcccacctacatgcaggaaaaccgggggatcggcggcatcgaggcgagcatgacgcagccgcggaccctcggcatcggcatcaagggcaccttctaggcgccccgagaagccggccccgcgcagggccggcccagccccagagcccatacaggagattggcacgatgagtaccccgaaacgcctgcacatcggcatgtcgctggcccccacctggctcagcggcgatgcctggcggcgccccgacagcaatatcgaaggcatcttcggcagcgatttcgccgtcgacatcgccaggcgctccgaagccgcccacctcgacttcgtgtttcgcccggacgtcagcagcctgccactggacgtgctggagaccggctccggcttcgccagcctggatcccaccgtactgcttgccgcggtcgcccgcgaaacctcgcggatcggcctggtgtcgacggtctccaccacgttctatccgccctacgtggtggcccggcagctgcaatcgctgcactggatcagcaacggccgcgccggctggaacatcgtcaccgcgctgcagggccacgagaacttcggcctggacgcgatgcccgatgcggagcagcgctacgcgcgcgccgccgagttcacccggctggtgcacgacctgtgggacagcttcccccgcgaggcactcctggtcgaccgcgagagcggccgctacgccgacgtttcccgggtgcacccggtcgaccacgacggcgaattcctcaaggtcaagggaccgctcaacctgccggccttcggcgaggcgcggattcccctggtgcaggccggcgcctccgagagcgggcgcgacttcgccgcctcggtggccgacctggtgttcgcgccgaccccggacaaggaggctgccctggaactgcgccgcgacctttcccgccgcgccgaacgccacggtcgctcgccgcgcgacgtgcgcctgctgccgggcttcagcctgtacctggcggagagccgcgaggaggcgcgggaaatcttcatgcagacccacgcgcgcctggaccgcacgcgcaagttcgccacgatcaggcagatgctcggcctcgacctcagcgactggccgctggaccggccgatttccgcggccgacctgccgccgccggtggccaaccccggcagccgcacccacactgacctgctgcggcgcctgatcgagcgcgagacgttacgcctggaccagttgctgctgcgccccgaggtggtttccgcggcgcactggcaggtcatcggtacggtggacgatgccgtcgagcagatcgtcgactgggccgccgccggcgccatggacggtttcatcgccgcgccgggaggctcggtcggctcgctgcggctgttcctcgaacaggtggtgccgcgcctggtggagaaggggctgttccgcgagcgctacagcgccactaccttcgccgggcacctggcagaggaatgatggaaagggccggcgacggccgcgtcctggcggcgatggcgagcgagtgaccgcctgcggttggccgcctgacgggcccgctgtatcgcagcacgccatccgaccggtggggcgtggtacaggcgagggagcctctgccttggcgtagataccgtcgtaccccggggatcatccggacaggtcgcagcctgggcagcgctggccgtcggcaggcctggcattctgctgttacaaccatccatccattcctgcggaaacgagtgaactcaatcgccccgagcgctgtctgtcagccgtcggcccaaccgggccgggcgcatggcccttggccatgcggtagccccgccccggtcgcgcgcttgtccataacaattcgactggccggctttttcgctcccctttgcgggtttcgttctctcgccatgtgaagattgccatgtccctatcccgtcgcatccccgccgctctttccccgttccagaaccgcgtcatcggagcctgcctgctcggcggcctgctggcggccggcgccccggcgcaggccgaggaggcgaccggcaacgcgcgctgggtgagcgacagcctgaccactttcgtgcgcagcggccccaccgatggctatcgcatcgtcggcaccctcacctccgggcagaaggtcgagctgcttggcacccagggcaactacagccaggtgcgcggcgagaacggcagcaccgtgtggattcccagccgcgacttgcaggaggttcccggccaggccgagcgcctgccgcaactggaacagaaggtggccgccctgaccgccgagctggacggcatcaacgacacctggaagacccgcgtgcagggcatgcaggaaaccctcgacacgcgcaagaagttgatcgacgaattgcaggcggcgcgcagcaacctggacgccgagctcggcaaggcccgctccgacctgcgtgcggtgcaggcgcaactgggcgacgagaacaagcaggtgctgatgcgctacatggtctacggcggcagcatcgccggcgccggcctgttcgccgggctgatcctgccgtcgctgctgagggtgcggcgcaagcgcaacgacaagtggttctgagcctccgcccgcgtctctgcgtttcgtaaagcaagccccgccggccgcggggctgtgtcgcaagcgcgacaagggctgaagcgtcagccgcccggcgagacgatgatcttcacgttgtgctccttgttgttcaccaactcttcgaaaccgcgctcgacgatttcttccaggccgatgcgaccggtcaccagcggtgcgatgtcgaggcggccgtcggctatgaaggcgatcacgtcggcgaactcgccgttgtaggcgagggccccgagcaactgcttctcggtggaaaccagctcgaagaaattgaattcactgggctcctcgaagattcccacaagcacgcatttgccggccttgcggatggcatcgatggccagcttggcggtgtgcttgttgccgatgcattcgaagctgacgtcggcgccaagcccgccggtgagggcgcggatttcgcctagggcgtcgcaccgcgaggggtcgagcacctggctggcgccgacctccagggccttggccttgcgcgccgaggacatctccagggcgatcacctgtgccgcgccggcggcgcgcgcgcacatgatggtgcacaggccgatggtgccggcgccgaccaccaccacgttctgcccgagcaggctgccggccttcttcaccgcgtgcatgcccaccgccagcggctcgatcagcgcgccggcctcgctgggaaatccggccggcagggcgtagagcaggttggccggtacgttgacgtattcggcgaaggcgccgttgttcatcagcccggtgaaggccaggttctcgcagatgttgtacagcccatgccggcagtagtagcaggtgccgcaatgctggcaggcgtctgcggcgaccgcctggccgacggcgaagctggtcacgccgttgccgaggcggacgatttcgccgctgaactcgtggccgaggatgcattgatccttgaggccggtgagcgggtgcggcgcctccacggggatgaataccgggccggccaggtattcgtgcaggtcggagccgcagatgccgcaccagtgcacgcggatctgcacccagccgggcggcggctcggccgggagcggcacgtcttccacgcggatatcgtggcggccgtgccagacggcggcgcgcatcgccgcgttggcttgcggggaactgttcatgtcggtcgtctcctcaatgctggcggaggaagtcgagcagcaggcggttgacctgctcggcggcttccatctgcaccatgtgcgcctgtccgtgaatgatctccacctgggctggcaggccctcggcatgccgcgccgggatgatcgcgtcatcgctgccccagatcgccaggaccggctggcggccctcgctcgccacggcacgcaggtcgttgcgctggcgaccgtcggcgaacaggttgtccagcaactggcgcagggccgcatcgacgccttccaggcgcttgtagcggagcatgtcctcgagcatctgccgggtgaccagcgcggggtcggagaacaactgcaccagttgcggcttcaacgcgttgcggttggccgcctcgacgaagccgcgcaggtagtcgccgttgatctcctcgccgaggccggcgctgccgatcaggctcagcgacagcacccgctgcggcgccaggcgcgcgcagttcagcgccaccgctccccccatggagtgaccggccaggtgtacctgttccaggtcgaggtggtcgagcagggccagcacgctgccgctgagttcatcgaggtcgccgcgcaccagggccttgccggactcgccgtggcccggcaggtctagagcgatcacccgccgctcggcggccagcgcctcgtggttgaacaaccagttgttcaggtcgccaccgaaaccgtggatcagcagtagcgccggatcgccctcgccgcggtcgaaatagcgcaggaggcgcccgtccaactcgactttccgcggtgccggtccgctatccccagcgtcctcgtcggcgggtacgaattcggcctggaagcgttgcaccagtgcgtcgatctcctcgtcgctcgcctcgccctcgaccaccacgccgagcagcgcgccgaccgccagggtctcgtcctcgcgcgccaccttgcgccgcagcacgcccgagaagggcgcctcgacgctgctggagatcttgtcggtctccacgtcgagcacctcgtcgcctttctcgatatgcgcgccctcttccttgagccaggcgtccacccgaccctcggtcatcgacaggccccacttgggcatggtcagtgtatggatccggctcatgccgcgtccctcccttccagggcctggcgcacggctgcctcgatcttcgccgcgtcggggatgtagaggtcttccagggcgtcggagaaaggcaccggcgtatggggcgcggtgacccggcggatcggcgcgcgcagcgcggagaaggcccgttcggcgaccagcgcggcgatgtcggtggccatcgagcagcgtgggttggcttcgtcgaccaccaccaggcggccggtcttttccacgctttcgagaatgctgtcctcgtccagcgggctggtgctgcgcaggtccagtacttcgcaggagatgccctggcgcgccaggctggcggcggcgtccagcgccaggtggaccatgcggccgtaggtcaccagggtgacgtcgtcgccgtcgcggaggaagttcgcctcgccgaagggtacgctgtacagctcctcgggtacctcgccctgcatcgaatagagcagcttgtgctcgcagaagatcaccgggtcgttgtcgcggatcgcctggaccagcaggcccttggcgtcgtagggcgacgacgggcagaccaccttgaggccggggatgtgggtccatagcgaagtgagcatctgcgaatgctgggcggcggcgcgcaggccggcgccgaccatggtacggatcaccagcggggtgaccgccttgccgccgaacatgtagcggaacttggcggcctggttgaggatctggtccaggcagcaaccggcgaagtcgacgaacatcagttcgcacaccgggcgcatgccgcgggtggcggcgccgaccgcggcgccgacatagccgatctctgacaacggggtatccagcacacggccggggaactggtggtagaggcccttggtgacccccagcacgccgccccaggcgtcgtcctcgccgggcgcgccggcgccgccggcattgtcttcgcccatgatgaagacgctcgggtcgcggcgcatttcctgggccagcgcctcgttgatggcctgctggtagctgatctttctcgccatgatggttctcctcgttcttgttttcgggcggctcagggataggacacgtagacgtcgcgcagcaggtcgtccggctccggcttgggatcgttcttcgcgcgctgcacggcatcctcgatgcgtgcctcgacctcggcgtcgatggcgtccaggtcgctggcggagagcaggccggcgtggcaggtgcgttcgcggaactgcttgaggcagtcgcgggtttcccggtagtgctttacttcgtcggggtcgcggtaggtctgtgcgtcgccctcgaagtgtccgtagtagcgggtcagcttgacttcgatcagcgacggcccctcgccggcgcgggcgcgctcgatggcggcgccggcagcctcgtggacggcgaagaagtcgaagccgtcgacggtcaccccgggcatgccgaaaccggcggcgcggtcggcgatgtggtcgcaggccaccgaccagttggccgcggtggcctcggcatagccgttgttctcggcgacgaacaggcacggcaggttccacaccgaggccaggttcatcgcctcgaacaccgcgccttcgttggagccgccatcaccgaagaaggccaccgccaccgcatcgctgcctttcagcttggccgccagcgcagcgccggcggccagcggcgcgccggcgccgacgattccgttggcgccgagcatgcctttctccaggtcggcgatatgcatggagccgcccttgccctggcagaccccggtcttcttgccatagatttccgccatcatgccgtgcacgtctacgcccttggcgatgcagtggccgtggccgcgatgggtggaggcgatgcagtcgtcgtcgcgcaggtgcgccatcacgccggcggcggaggcctcctcgccggcgtagaggtggacgaagccgggtatctcgcccgtggcgaactcgacgtgcaggcgttcctcgaaggcgcggatggtgcgcatcacgcggtaggcatggagcagttggtcggtgctcagagtggacatcttgttgttctccaggttgtcttcacggggtcatcggggttcgctggccggccagcaggcgatggcgggcggcgtaggcgagggtggccggcacatcgacgctgaacgggccggaagggtcgagggtgatgctcgggcggtcggtggcgctgaactcgatctcgcgctctccgtccagcgccagggtcccgctggacaggctcggtgcgtgggccacgccgggttgcaggtagccggcggcagagaccccgcagcccaccagcaggcccggcgccagcggcaccagcaggctctcgcgggcgtccggatgcaggcgcatccaggcgccgtggggctcctcgcggctcaccggcgaccacagtccgcaaagcgccgaaaggccgatggcgtggggttcggcgaagctgacgaagacttcggcgaggtcttcggcgcgactgatggcgcgggcgccgatgaacggctgcggcgacaccgcgacgtccaccagcgcccactcgcagagcccgcggcgcggctcgcgcaccagcaggcgcttgttgcgtcgcaggccgatctccggcggcacccggttgctggcgcagaggccgccggcgagccccgcgccggtggcttcgcgcagctccgggaaagcgttgttggtcccggtggacagcgccagcaaggggacgtcgccgacctcggcggccactgccttgtgcgtgccgtcgccgccgagcacggcgatcagcgccacgccgcgctcgaccatgcgccgcgccgccaggcgggtatcctcgacgctctggcgcagcggcatgtcgaggaactccaggaacggccagtggccgtcgcgggcctggcgggtctggctggcccggagcacggcggcggcgatgccggtcatgtccggcggcagcaacgcatggcggatgccggtggcgccgaaggcggcgagcaggcgttgcaccaccgatgccttgtcggtgctggagtgcagcccggcatgggcggtgaggcgacgcaggtcgcgaccggaggccgggttggcgatgatgccgacgatcggcgagggcggggtcatagcgagaatccgccgtcgacggcgatggcctggccggtgacgtgcggcgcgcaggccaggtagacgacgagctggcccatgtcttcgacggtctgcgcctcgccctggggcagcaggctggcctggtggcgttcccaggactgcgcctcgctttcgccggcctgccgccagcggcccgacaagccgtcctcgccgcgccacattccggtgccgacgattcccgggcagagcgcgttgaccgtcaccccgtcgcgcgcgacctccttggccagggcattgctgaaaccgatcacggcaaacttcgaggcacagtagtgggcgaggtcggggagaccgaccttgccggcgatcgatgacaggttgacgattcgcccccagcgctgcgcctgcatcagcggcagttcggcctggcagcagaggaacacgccgcgggcgttgacgttcatcacccggtcccagtcggcgaggctgagttcggcgaccttgcggatgctgatcaccccggcattgttcaccgccacgtcgagccggccgaactccgtggcgacccgctcgaccatcgcccggacgctgtcgccgtcgctgacgtcgaccccaagggccaggctgcggcgaccgaggctgcggatcgcggcggcggtttcctcggcgacctgcggatcgaggtcggccaccgccacgtcggcgccggcgcgcgccagggcgagggcgatgccccggccgatgccgcgtccggcgccggtcaccagcgcgacccgggaagacagggagaaatcgtcggacgacgtagcgtgcatgcttcacctctgattgttcttgtaggtgtatgcggcagggcgttgggaggagcggacagtccgccctgccgtcgccgtggctggagcaaggccgatgccaggttgcggcgtggcggccggaaggcccgtcgtagagcgccggcatgggaaggccggcgaccgccggggcgacgtccggcgagacaacccatgtcatcgcgcacgggttcccggcgagacgctgagacgctccgtctcagtcgtcggctgtggcggcccggcgcttgtcgagggtcgccgatgggcgcttaatgggcggcacaacaacaagatgccgagcaacggaggccccatgctttccgcacactcgaaggaccatgtggactgtgtcagccgtgtcctgaggaacgccgcgcgcctgccgcaggcgccggtgccgacgccgatcctcgactcctggcgccgctccatggagcagcaccgtctcgacccggggtccctgcaagggccgcggattctctcgcagaccctcctcgacgaatgtcgcgagcgttccgaactgttcctgcgcatcgccagcgaagaggtggcgcgactgcatggacgggtgcgcgatgccgactactgcgtactgctcaccgatgcccaggggcggaccatcgactaccgtgtcgagtcgaccatccgcaacgactgccgcaaggccgggctgtacctcggcacctgctggtcggaaggcgaggagggcacctgcggggtggccgccgtactcaccgacaggactgcggtgacggtgcacaagcgcgatcacttccgcgccgccttcatcgacctgacctgttccgcggcgccggtcttcgatccgcagggcgagttgctcggtgtgctcgacgtttccgccgtgcaatcgccggacgaccgccgtagccagcatctgatccggcagatggtggcgcagagcgcgcgggagatcgagaacgccttcttcatgcacagcgcccagggccattgggtgctgcgcgcgcaccgtgcgccgggctacgtcgacagccagccggactacctgttcgcctgggacgccgatgggcgcctgctggcgttgaacccggcggcgcggcactacctgcggcagcgcctggggcaggtgccgagccacatcggcgaggtgttcgacctcgacgccctgcacgccgccgccgaccaggcgccgtgcctgctgcgcggccaggccggcgagctgcacgtgcgtctcagcgcgccgcgggccaaggcgcggcggctggagcgcgaggtgcccgacgacgctgcgctcgacccgcgcatcgccgaaagcctgcgcctggcggtgcgggtcaaggaccgcaacctgccggtgctgatccagggcgagaccggcgccggcaaggaggttttcgcccgccagttgcaccaggccagcgcccgtcgcgacaaacccttcgtcgcgctcaactgcgcggcgattcccgaaagcctgatcgagagcgagctgttcggctacgttggcggagcctttaccggcgcggcggcgaaagggatgcgcggcctgctgcagcaggccgatggcggtaccctgttcctcgacgagatcggtgacatgccgctgggcctgcagacccgcctgctgcgcgtgctggccgagggcgaggtggcgccgctgggggctgcgcgccggcaggctgtggatatccaggtgatctgcgccacccaccgcgacctggcggcgctggtggcggccggcggcttccgcgaggatctctacttccgcctcggcggcgcccgcttcgaactgccgccgctacgcgaacgcagcgaccggctggcgctgatccggcgcatcctcgacgaggaaaccgcgcactgcggcgtacgcatcgaactcggcgaggcagccctggaatgcctgctcggctatcgctggccgggcaatgtccgccagttgcggcatgtgttgcgctacgcctgcgcgctgtgcggcggcgccaccctgcaactcgccgaccttccggcagagctgcgtggcgaaggccggacaccggccagtgcgtgcgagagcggcggcggtccggagcgcgacgccctgctcgacgccctcgtgcggcatcgctggaaacccatggccgcggcgcgggaactgggtatctcgcgagcgaccctgtatcggcgggtgcgccggcatggcatccgcatgccgggccaggcggacgactgaggtgcgccggcggccggcgcagtcgtcaagcgcggaaaatcaaaaccagccttgagccttgccccgttaatgccggtgggctttccctgtagcgttccgggcagcggcgcaacccgttcggtcgcgccccgccaggagcctacggaggaaacccatgcccgccccgcaccagccagcccgcaatccgaccggggagttcgacccatgccgctagccctgctgctcgccatgggcgcgttctccctgagcctgtcgatttcccccggtccggtgaacctgaccatcgtcgcttccggcgccaaccatggtttccgccggaccctgccgttcgtcaccggcgccaccctcggcttcgtcctgctgctggccttcatcggcttctggttcgtccgcgcgatcgaggcctacccgcgcttcttcgactacctggggatggccggcgcggcgttcatcgctcatgtgggctaccgcatcgccaccgcggatccacgcctggccctggaggaaaacggggtccccgggttcttccagggcgtgctcctgcaatggctcaatcccaaggcctggatcgcctgcgcttccggcgtggccttgttcgccagcccgagcacgcacgcgccgctgctggtcttcatggccatctacctggtggtctgctacctctcgctggccgcctgggcactgctcggtgaccgcgtggcgctgctgctcgacagcccccggcgggtgcgcctgttcaatcgggcgatgggcggcaccctggtgctgaccgctggctacatgctctacctgcagctcgccgctagcccggattgaaggcctcgtagaggcgattgatgagggtataggcgatgctgctggcgggtacgttgggcggccacaccgcatacaccttcaacggctccaggcgccattccggcagcaccgcgcgcaactcgccgcggcggatcggctcgtcgctcaggtaggtcggcggcgcggccaggccgacgccgaggcgggccaggcggcaggaggcttcgacgctgtcgacgcgcacccgcggggtgtagtcgacgcgtacctcctcgtcgtcccgcgcatgacggaatagccggctgtcggggcgcatgccgagcccgatccattccagccgctgcaggtcgcgcgggtgttccagcggcgcgtgccgggccaggaatgccggtgccgccactacctggcgcggcagcaggaacaggtgacgggccttcagcgagctgtccggcaggtcgccgatgcggaaggcgatgtcgatgccgtcgccgatgatgtcgtggcggctgtcgtcgcaggcgatgccgaggtcgaggtcgggatgctcctcgatgaaggctgccaggtgacgggtgaagtcgccgttgacgaacaccgcgggcatcgagatgcgcaggctgttgcgggtcgagacggcgcgctggcggaactcgatgaagcccttctcgtagagttccagcatggagcgggcggtgtccagcaactgcgtgccgtcctgggtcagcgacagcttgcggctgttgcggtagagcagcgcacggcccaggttccgttccagcctggacaggtgcaggctggcggtcgcggcgctcaggcccagcgcctcggcgccgccggagacggagccggtctcggcgatcttggcgaatacgatcaggtagcggatgtcgtcgatcatgcggtctctcgtcgcaggggctgggtgcatcctgcgcgatggcggccagccggacaagcgcgagaggtagagagcggcggcgcttcccgggcttttcagcgcaggctccagaagcccaggcgaccgaggctcgccgccagtcgcaggcgcgaggtctgccagttgccgagggcgcggatgtgctggtcctcggcgctggcgtaggcggtcagggcgttgagcagctcgatcatgctgccgacccctgagcggtagcggccctgcaccacctccaggctttgccgcgactgctcgaccagttcgcgggtgcgcgccaggctgcgggtctcgacgctgagcgactggtagttgttccacacctccagcgaaacctgctgctcggtgtcggccagctccgcttcgctggcttcgcggcgggccagggcgttgcggacctggtaggtgcgttcgaagccttcgaacaacgggatgttcagttgcaggccgatgctgcggtcgcgttcgcgggtatcgccgttgaacgccatcgcctggtcgctatggctgcgtgccaggttggcgctcagcgccaggctcggccggccggcggcgcggctttcctccaccgaggcggcggcggctttcagccgcgcctgggcggcgagcagcgccggatgctcgcggcgggcttcggcgagcatctcgtcgatggccttgacgaagccggtgtcgggttgcgcctccagctcgccggagaggcgcagcggggtatccggcgccaggcccatgcgcagggcgatgacgccgagggcgttgctcagggcgccttcgtcgcggacctgggcgaggctcgcctgggacagcgcggtctgcgcctgcaggcgatcggaaagggcggcggcgccggcccggtacttggcgtcggcggcttccaggttctgcgccgccagctccgcgacctgccgcgaggcggccaggctgcgctgggcggcgagggcgtcgtagtaggcctgggcggcgagggcgaaggtgttctgcagggtcgcgtcctggctggcgttggccgccagcagcaactgctgggcgttgcgcagggcggcgctgcggcggccgaagtcgaacagcacccagctcaattggaggctggcgccacgccggtggcgatggccgtcgccggagaggtagggggcatcgcgataatccatgtcgctgtagccgcgactggcgtcgagacggccgtccaggcgcggcaggtaggcggacttgccgatcccgacctgggccgcctgggccttggcattggcccaggcgaggcgggtctgtgggtcgtggcagaggatccgctcgatggcttcctccaggctcagctcggtcggtggcggcccgccgcggcagggcaaaccgctgccgccgaggtcgtagaccgcctggccggcgacctggccggcggtgccgaacacgtccggctcgtaggcggcggcgccgggaaccaggccgagcaggccgcacaacaggccggcgagggcacgcatcaggcctgctcccgcgccgcggcggcctggcgttcggccaggcgcgcggtgctttcgtcgaggcttaccttgccctggccgaggactatcacgcggtccgccgaggcgatggtctcgggccgatgggcgaccatgatgcgggtgatgcgcagcgcgcgaatggcggcgttgacccgctgttcgcagtgtacgtcgaggtggctggtggcttcgtcgaggaacaggatgcgcggcttcttgtacagcgcccgggccagcatcacccgctgcttctggccgccggagagcaccgtgcccatgtcgccgaccagggtgttgtagcccatcggcatggcctggatgtcatcgtggatggcagccatctgcgcgcactgcagcagccagggcatgtccggttgcgggtcgaagaaactgatgttgtcgctgagcgaaccggcgaacagcacgtcgtcctgcagcaccgtgccgaccagttcgcgcaggccgtccaggcccagttgcgcaaggtccaggccggccatgcggatctgtccctccactggcgggaggatgcccagcaggacgttgaacagggtgctcttgccgcagcccgaggggccgacgatggccaccgactcgccgccggcgatgcgcaggtcgaggccgtcgaggacccagggctcctgttccgcgtagcggtagcgcaggccctggatctcgatgctcgcctcgcgctcgcggaggttctccgggaggatgtcgccgtggctgacctccggggcctggagcacgatgtcggccaggcgctcgccctgcaactggagcatgcgcagctcgaagaacttgtcgatcaggctgccgacgcggctgtcgaactgcgacttgtaggcgttgaaggccatcaggatgccgacgctgaactggccgtccatcaccatggtcgcgccgagccagatcaccagcaggttctccacgccgaacagcaggccgttgagctgctggtagaacagttgcagcttctgcgtacgcaggccggcgttgatctgttccaccagcaggccgagccataccgagcggcgctcgtcctggcgctggaacagcttcagcgggcggatgccgcgcaccgtctcgaggaaatggctctgctggcgcgcggcgtggacgatctgctcctcggtggcgttgcgcaacggccggtaccagatccagcggccgagggcgtagaggctcatggcggcgatggcgatggccgccagtggcggactgtagagcagcatcatgccgagggtggcgacggtcatcaggccgtccagcaccgccgagaggaaggccgcggtgagggtctgctggatgctgttcactgcgccgaagcgcgacaccacgtcgcccaggtggcgcttctcgaaatactgcgcgggcagccgcagcaggtggctgaagacgttggcctgccactgcacgccgagcagggtgctcatgtgcatcatcacccaggcgcgcaccccgctgaccgcctgctgcatcagcagcaacaggccgaagccgatggccagggtgctgagcaggtcacggtcttcgctgacgatgacgttgtcgatggtccattgcaggaagaacggactgatcagcgagaacacttccagcgcgccggcgagcagcagcacctgggccagcgagcggtacagcccggtgaccttgccgagcatgcccagcagcttgatccgcggcggcgcctcctgtttctcgaagccgctctccggccagagttccagggctaccccggtgaagctccgcgagacttcctccaggcccagccggcgctggccgtgggcggggtcgtggagcaccgcgccgcgcccgtcgaccgccttgagcacgacgaagtggttgaagttccagtgcagcacgcagggcagcttgagcttgccgaggtcgccgaggtcgagcttcaccgcgcgggtacccgggccgaggcggtgggcggtctggatcagttgcttgagggagatgcccttgagcgatacggagaagcgccggcgcagttccatcaggccggtatggtggccgtggtagccggcgatcatcgccaggcaggccaggccgcattcggtggcttcggtctgcagcaccagcggcaggcggcggcccaggcgcagggcgagagcgtcgagaaaggccatgggtcgttcctagagtttgccggtcaggctgtagagcggttccagcacccattcgtagaggcgccgggtgtcctggaggatgtcggcgtccagcagcatgccgctctgcagcggacgcggctggccgtaggcggtcaccgcctggtcgtcgagggttacccgcagccggtacagctgctcgccatcctggccgagccccggtacgccgccgaccatgctggaaagctcggcataggagacgctggcgcgggagatcgactgcaccttgccgtggtactggccgaacttctggtacggataggcctggtagcggatcagcaccgcgtcgcccggccggatgaaaccgatggacttgctcggcgcgtagagttcggcctgcaacggggtgtcggcgggaacgatgctcagcagcggacgcgagctgtcgacggtctgcccggcttcggcgagcacggcggtggcgatgccgctctccggcgcggtgaccagcaaggtgcgcttggcttcgctttcggccaggtcctgctccaccgcgctgagctggcggcgggtttccgcgagctggttggcctggcgcgcggaaagcccggcgagttcgttgcggcgctcggtcaactgctgccgcagcgacgtgcgttcgcgctccaggccttgcagggtctggcgctggccgagcagctcggcctggcgctgctgcaactggtccatggagatgtagcccttgtccatcagcccctggtagcgcgcggcggcgtcgctggccagcgccagcaggcgttgctggctgtcggtctgggcggcgagggtggtgagttcgcgctgcaggctggcgaccttgctggtcaggctgtcgcgctcgtcgtcttgcaggcggcgaagcttttccagttcgtcgcgcagggagtcgcggcgttgttccaggcgcctgctgataccggcctgcaccgggccggcatcgctgccgtagcgttcgctggaaagcaccatcaggcgctcgccgcgtcgtaccgcctggccttcctggacgaacttgcgcagcacgatgccggcctgcggcgcgtgcaccttgacctggccgttggcgggcaccaattggccgctgacggtgctgcgcttggtgtagctgccgaacaggaagaagcccaccaccagcagcgccatcgccgcggccagcagggtgagaaaagtgaaggagaccgggcggatcagcacgatctcgcccaggccgccggcatgctgggcgtcgagggcttcctggcgaaacatggtggctggatcctggattcgaataatacttgcatgacactccgacacccttgcgaaagttcaaacgcatgaagtgccggagtgcgacttttctaattagatggtggtgcggcctacatcaccgggaccgaagttttcccggtattggcccaagtaaccgacagccgtctctgcattggtgaagagaccgaccgtgcccccggcaatagcgcccatggcggttggcacgatcaggccgaccaactgggaaagagcgccgaagccgaagccgccggcaccgccccatttcccgcctattgccatgcccgtcgcggcgccgtcgacggcgcctacgatcatgccggaaagagttccacccgaaacgcaggtgacttcaatgtcattgagttctttcatttcatatatctcctttaggcttcccgtgagtctggaaagccattcgatggtactaatccgaaagagtgggatgaactgccaggattagcggtttttcatgggctcgataattcgtttgacaatgagtttcaatattcggcggatgaaggtttgccactccgggtaaactttgcgaatgattaaggccggttcgtgcgacacctcgataagacctgttgaacaagtcaacgccgtatcgagggctcattcatatcggctccggccaaccgctcttcgtccgagtcagtacggcctcgcatagcggcatttcatggcatcagccggtcgagcagcggcgagctgaacagccgatgcggatcggcttcgttcaactggcgcaccgcgctgtcccaatcgttgtctgcgaccaggccctggcgtagcgactgcgccaccaactggtcgaccaccgtcggctcgtcccaggcggcggcggggctgtagccccagcccttgctccactccacccgcagcgaggcgtagtcgccgctgaagtggtcgaacagccaggcctcgaactcgtggtagaaggcattggcctgcggggtaccgggcaggctgaggatgtccagccagatcgccgtgtcccactccggttggtcggggcgcggacggatcgccgacaggctgggcacctgggcgccgggaacgatcgactcgccgggctggtcgagcccgctgacgcgaatctccaccgggccgttcatggggtagtggccgttggcgcggtaggcggcgaccatcgtctggtactgcaggtagaactcgttgatcacccgctgcacgtcgcgacgccgggtcagcaccgcgtagccgttggcggtgacgcgaagggtgctgggcttgatgtacagcagcaggtccttgctccagccccacaggtcgtagcccagggtcagcgccatgccgcccactaccaggtcgtactgcagcttgccgagcagcggggtgagttccgggtggccggtgttgatcgccgccagcaggtcggacagcgccttgggaatgttgtcggagaaggggtagttgaacgggccgttgaccgcgcgggcgccgaacgggcagcgcggggtcggcgtccagaccttcagccagggcttgtcggtgaaggggaaccagatggcctcggcgcgtccgcttttctgcaggaagctgtcgaaggtccttccgccgctgccggctgcggcgaacatctcgctcgccgggatgttcacgtagctctggcagcgcatgcgcttgttgaccccggcctggagggtcgcctcgacgatgaaggcgcgtccgaggtggacgaggaacggcgcgcaggccggatcgtcgcggcggaaggtcttcagcacgtattttccggcggcgccgtcccagaccaccgcggtcagcgccacgatgctgttgctcagggagccgtagctctgccccggcaggcggctttcgccctgcgccgggatgccggtgccgtggccgtcgatggcgagcaccccgccgagggtcaggtcacccggcgccggcgtggcgacgaagccgagcttgacccgctccagttgtttcagcagggcttccatggtgacgccggtctgcgcgctgaacaggccgaactcgccttgggcgtcgatccgtacgcgggtcaggtaacggctggtttccaccagcacgatgcggctctcgcagttctcgccgcctttcagcagcagcggggaccagttgtgacccatgccgcgcgggcgcaccttgaagccgttctgccaggcccagttgaccaccgcgagaacctcttcgttggtgcgcggggcgcagctccagaggtcgtcggcggcgatttcccccgaccagttgcggaacgcccgccgataaagttcgaggccggccggaaagcctgccggcgccggacaactgctggcggcggcttcggcgggctggatgacgaaggccggggtccagccggccaccaggccgaccgcgccgagcgtggcactcttgccgaggaagctgcggcgcgacaggccgccggattcctggtcgggatcgccgacgaaggcgtcggcttgctggatggggtcgtgcatggcggttctcctgatcggggcgctggtcgccccttcccggttgccgggtcctaggtcgccgccgggggcgtccgggtctccggcgacggtggaggcccgctccgcgacgggagcgggccgaggtcctgggatcaggtccactcggtgtcgtagtggtaatcgatgcggctggtgtcgccgccgagcaggccgccgaccgcggcgacgcccttgaacacgccgtagccgagggtgtcggccagttgatggatgggggtcaggccgacggcgttgaacaccttgccgaccgaagagatgaccgacgtgttgagcaggtcgttggacaccttgaccacatcgacgatggcatcgccgacgaagctgaagagtccggcgcccgatacctggtcgatttcatcgaagctcagttcctgaagtgtggcgagttgcatggcgctattccttcatcaatcaagttttgagcgatagccggccctctcgcataaacatcggtttgcgaagatagagtgactatcggttgccagccgctctggaaaagtactttgccggctggtcgctgaaaattactgatctgccggcgagagtgtcaatctgggaagttgatagggtgaacttggaatatccatgctaggcaaatgacgccgatattctgtcagtggaattggtcgatgttttttcgaatgccgcgataagcatctggatattgctgatccattgatattcgtgggtactgggaagcggttcgctatttttacgagatgatgcgccaatccagaaaagtatcgaattattgctttcggaaaaaattcaactgccttgctgataggtttcttccggtcgagttattgaagtccatgtccggtcttgcgttgtttttcaaagtagagaaaccggcgtcataaatttgtgcggataactggcgggcaaactttcccaggctgcgcttctgttgcggggaagtgcttcggttcgtgtcgaggcgctttccagtcttgacagcccggcacaggcgcgtagagtgccgcgcatgaatcgtgcagccctgaccttcaagcgctattacgcctatctgctccctcattgaggcggtagatgcgtcgctgcattcccgaaccgcccgaggcggcggtccggtgaactccctcccaacctgtctcctcgggcatccaccgtgccaaaggagatacccgtgtccgtcccgacccatcagcaagacctgatcgccctgctcgaagagcgtggcttcgtccaccagtgcaccgaccgcgacggcctcgccgcgcacctggccgccggtccggcaaccgcctacctgggcttcgacgccaccgccgacagcctgcacgtcggccacctgcagggcctgatgctgatgcgctggctacagaaggccgggcaccgcccgttgctgctgatcggtggcgcgaccacccggatcggcgatccgagcttccgcgattcgagccggccgatcctcaccgaggcgcagatccaggccaatatcgacggcatcgcccgggttttctcgcgctacgtcgaactgcacgacgacagcctggtgaacaacgccgaatggctggacggcgtcggctacctggagttcctcgaccgggtcggccggcacttctcgatcaaccgcctgctgaccttcgacgccatcaggcagcgcctggaccgcgagcattcgctgtcgttcctcgagttcggctacaccctgctgcaggcctacgatttcgtcgaactgtcgcgccggcgcggctgcaccctgcaactcggcggcgccgaccagtgggcgaacatcatcaacggcgtggagctgtcgcgacgccagggcggcgcccagctgttcggcctgaccatgccgctgctggccaccagtgacgggcgcaagatgggcaagtcggcgcagggtgcggtatggctcaacgccgagcgcctggcgccgttcgacttctggcagttctggcgcaactgcgatgatcgcgacgtcggtcgcttcctcgccctgttcagcgaactgccgatggatgaggtgcgccgcctgggcgccttgcagggcgccgagctgaacgaagcgaaggtggtcctggccaatgccgccaccgccctggcgcacggcgagcacgccgcgcgatccgccgccgatgccgcgcgcggggtgttcgccgacggtacgcgggacagcggcctgccggtgatgaagctatcccgcgcgcgcctggcgcagggactgtcgctgaccgacctgctgctggaacacgcgatccagccctcccgcagcgcggtccgccgcctcgccgccggcggcggcctgcgcctggacggcacgccggtcagcgatccggacgcgccgctggcgggcgaggtcgacgggctgcgcttgagcctgggcaagaagcagcatttgcacctgcgactcgaggattgaggtgcctgcggccccaaggggccgcgcttcaccagagctttagcgtgtaattgacgatgaagcggttctcgtccaggtccgcaccgtagcggctgcggtaggtgatgttgcgccatttcaaggcgacgctcttcagcggtccgctctggatcacgtaggacaggtcggtgttgcgctcccattcgctgtcgtcggcacggccggcgccgcggtcgatgtcgcggccctgtacatagcgggtcatgaggttcaggccgggcaggccgaggccggcgaagtcgtagtcgtagcgcagttgccaggatttctcctgcggtcgggtgaaggtctggtaggccatgaggttggccacgtagggcgtggtgtagccgttgagcaccggaaaggcgtcgttgccgatcatcttctggacaccgatgccgaaggcgtgggcgccggcgcgcagggtgagcatggcgttgaggttgcgattgtccaccggcccggagatcgccgcgccgtcttcgccgctgtcgaagtagcgcaggtcgctgcgcagcgacagcccttcgcccagcggcagggtgtgcagcaggccgagatagtgctgccggtagatgtccttgagctggccgtagtaatagctggcgctgagccgaggggtgaaggcgtaggtcgcgccggcgagattgaactcgtcgctggcgtgggccttgtcgcggcccatgatgtacatgtcgtcgctgccggccgactcgcgagtgcgcgacttccacaattgccccgcggtgagggtgagaccctcgatctcgctggaggtcagcagcgcgccgtcgaaggtctgcggcaacaggcgcacgtcgtcgcggaacgccaccggcagttgcggcatgaggatgccgacctgtagctgggtctgcgaatagcgcagcttggcggtcaggccgaggtgactgtagtcgtccaccggctccttcgaattcgctccgaacggcagcgtgccatcgttgctacgcccgcgtcccgagtcgagcttgacgccgagcagcccggtagcatccaggccgaagccgagcgggccgtcggtgaaaccggattgcaggcgcaggacgaagccctgcgaccagttgccggcctgcgattggggcgcatcgtgctggcggtagtcgcgcaactggtagaagttgcggaggtcgaggtgggcgctgctgtccgcgaggaattccgcttgcgcggcgaggggcaggaggccgaggccaagcgcatagctgcgccaggcgcacgggcgggggcatgccgtgatcatcgattcttcccttggttgttgttcttgtaggtatgggtgacgccgattgcacggtgagttttagcatattgttaacttgttaatgaagtgttggcgatcctcccggaagcttcgctagcctctgcccctttccatgctcatcgagcattgacggtaaggcgctggagagcgaagccagcctggaatctttcgccttctgcgcatttggttaatctgttaacgttgtcggcccgcgaaaggagccaggcccgcgcgctgccagggtgaacgaggtcgcggcgcgaggatttcccggacggcgaacttgcatccgcgtgcacggcggtgtcgtctggaccgaaaggcgaagaagaggagggcgagcgtgcctgcgagtgcatcgaggattcaggtcggaagcggcgaacgacgcctgttgctgctgttgtcggcgctggtggcgttcggcccgctgtcgatcgacatgtacctgccgagcctgccggcgatcgccgccgatctcggcgccagcgatgcccaggtgcagcggagcatcagcggcttcctggtcggcttctgcgtcggcatgctgttctacggccccttgtccgaccgtttcggccggcgcccggtgctgctggccggtatcgccttgtacctgttcagcagcctggcctgcgcgctggccgacagcgcggggcaactggtcctgctgagggtgctccaggccctcggcggcggcgccgcgtcggtgctggcgcgggccatggtgcgcgacctctatccgttgggcgaggccgcccggatgctggcattgatgcacatggtgaccatgctggcaccgctggccgcgccgctgctcggcggctacctgatgctctgggccggctggcgcgcgttgttcgtggtcctggcgctgttcgccgggctctgcctgctggcggtctggcgggtcgccgaaagccacccgccggagcgccgcggcggcagcctggcccaggcctttctcgcctatgggcggctgctcggcgaccgtcgcgcgctgggctacgtgctgtgcatggggctggcgttcgccgggatgttcgcctacatcagcgccgcgcccttcgtgttcatcgagcatttcggcgtgcgcgcggagcgcttcggctggttcttcggcctgaacatcctcggcgtgatgctcgccacctggtgcagcgcgcgcctggtgcgccgccacggtccgcggccgctgctgcgggccggcagcctgctgggctgcgtgtccgggctgttcctcctcggctatgcggcgctcggcgagcggggcgggttgtgggcgctggtgcccggcctgctgtgcttcgtcagcgtcaccggcctgctcggcgccaactgcatcgccagcctgctggcgttgtatcccggacaggccggggcggcttcggcggtggcggtgtccgggcagttcggcctcggctgcctggccagcctggcggtcggctggctggcgctgcccggcgtgctgccgatggcgctggtgatggccgtctgcggcgtcggcagcctgctcgcgctgggcttggccctgcacggcggaaaccgttgatttccttctgcatacccgcatgcagcctgtgttttttccgctactcttctgcactttcgaaaccagtcatccaagctcggaccctatgtcaacgccaagaccctccctgaccctgaccctgttgcaggctcgcgaagccgcgatgagtttcttccgcccctccctcaaccagcacggtctcaccgagcagcagtggcgggtgatccgcatcctgcgccagcagggcgagatggagagctaccagttggccaaccaggcctgcatcctgcgcccgagcatgaccggcgtgctggcgcgcctggagcgcgacggcatcgtccggcgctggaaggcgcccaaggaccagcggcgggtctacgtgaacctgacggaaaagggccagcagtgcttcgtctccatgagcggcgacatggagaagaactaccagcgcatccaggagcggttcggcgaggaaaagctcgcgcagttgctggaactgctcaacgagctgaagaagataaagccctgaagcgcctggccggcgtcatgccggccaattcttgtcccagtgccggcagtcgccctggcagcgaccgggacagccgcagccggtgcggctcctgccggtttcccgctcgacccggcgggccacctcctcgtcgtcggcgaacggcagcatgctcgcctggtccagggtcttggcgtggcgcaggctccaatgcacgccgaagaacagcacggcgaccgccagcagctccagcaggatctcgctccagctgaattccatgatgattctcctcgtcggctgtcgagccttgcccgcagcgtggcgggcgaggctcgggaagggaagggacgcgctgtcgcggctcaggccatgcgggccgccgcgaggattccttccgggcgcgcctggcgtaccgtgcgccaggtgttgtagctcatcagcagcatgccggtgaggaagaacccgccaccgaccaggcgcacgatgaagcccggatggctggccaccagcgactcgacgaaggagtaggtcagcgtgccgtcctcgttgaccgcgcgccacatcaggccctgggtaatgccgttgacccacagcgaggcgatgtacagcacggtgccgatggtggccagccagaagtgcgcattgatcaggccgacgctgtgcatcttctcgaccccgtagaccttgggaatcaggtggtagagcgagccgatggtgatcatcgcgacccagccgagggcgccggcgtggacgtggccgatggtccagtcggtgtagtgggagagggcgttgacggtcttgatcgccatcatcgggccttcgaaggtggacatgccgtagaacgccagggacaccaccaggaagcgcaggatcgggtcgtcgcgcagcttatgccaggccccggagagggtcatcatgccgttgatcatgccgccccagctcggcgccaggaggatcagcgacatcaccatgcccagcgactgcgcccagtccggcagcgcggtgtagtgcaggtggtgcgggccggcccagatgtacagggtgatcagcgcccagaagtggacgatggacagccggtaggagtagaccgggcgcccggcttgcttgggcacgaagtagtacatcatgccgaggaagccggtggtcaggaagaagcctacggcgttgtgcccgtaccaccactggaccatggcatcggtggcgccggagtacatcgagtaggacttgaaccagctcaccggcagcgacatgtggttgacgatgtgcagcatcgcggtggtcaggatgaacgagccgaagaaccagttgccgacatagatgtgcttgaccttgcgcttgatcagggtgccgaagaacaccaccgcgtaggcgacccagacgatcgccagccagatcgcgccggtgaactcgatctcggcgtattccttggtggtggtgttgcccagcggcaggctgaccagcaggatcaccgccaccgcctgccagccccagaaggtgaaggcggccagggtgtcggagaacagtcgcacctggcaggtacgctgcaccgtgtagtagctggtggcgaacagcgcgcagccgccgaaggcgaagatcaccaggttggtatgcagcggccgcaggcggccgaagctggtccagggcaggtcgaagttcatctggggccagaccagttgcgaggcgatcagtacgcccaaccccatgccgatcacgccccataccacggtcatgatggcgaactggcgaaccaccttgtagttgtaggcaggttccgtcgttgctttgttcatctgtacagtcccgaaagaaatgaacagccggcgaccgccgtcgaggggggagacggggcgccggccggagcctgcaatctaagggctggggcgggggtaaaacagcttcaggtcgatatggaatttgggtatcagatggggcgggggaaggcgttcgtgcagggcggcggcgcataccgggatgggggacgcgagccgatcatggcggatgaccgcgcgcggttatccgccctacgccggggtggctttccgtctgcggggcgtcatcccgccagcgactgggcgatccgcccgagtgtctccatcgccttctcctgccgcgcgctccacgggtgcccgtagttgagccgggcgcaatgggcgaagcggcgggtggcggagaagatcggccccggggcgaggctgatgccctgggccagggccagttggaacaggcgcagcgagtcgaccgcctcgggcaactccagccagaggaagtagccgccgctgggacggctgacccgggtctgctcggggaagtaacgcgccaccgccgcgagcatggcgttctgctgggtctccagggcgtagcgcagcttgcgcaggtggcggtcgtagccgccgtgctggagatagtcggcgatggccgcctgggccgggatcgacgccgacaggctggtcatcagcttcagtcgctcgatctgctcggcgtagcgtccgccggccacccagccgacccggtagcccggcgccaggctcttggagaaggaactgcagtgcatcaccaggccttcctggtcgtaggccttgaccggtttcggcgcctgctggccgaagtacagctcggtgtagacgtcatcctcgatcatcggcacctggtggcgcgccagcagctcggcgagggcgcgtttcttctcgtcgtccatgctcgcgcccatcgggttctggaagttgctcatgaaccagcaggccttgatcggcaggcgctccaggctgtcggcgagcacttccaggtcgatgccttcacgcggatgcacggggatttccaccgccttcagcttcaaccgttccagcacctgcagggtggcgtagaacgccggcgcctcgatggccaccaggtcgccgggacgggtgaccacctgcaggcagaggttgagtgcctccagcgcgccgttgctgatgaccagttcttccaccggcagcagcaggccgccgaccatgtagcgcagggcgatctgccggcgcaggccatggttgcccggcgtcatgtcggcgaccaccgactgcgggtccatgtcgcgcacggcgtgggccatcgagcgcgccaggcgcggcaggggaaacagttgcgggctggggaacgccgagccgaagggcacggtgtccgggtccttgatcgaactgagtacggagaacaccagctcgctgacgtcgacctcggtggcgtcggcctggcgcgggctgatctccggttccggcagcggccgctgcacgtgctggcagacgaagtagccggagcgtgcgcgggccatgatcagcccacggctttccagcaggtagtaggcctggaacacggtggaagcgctgaccccgtaggtacggctggcgtgccgtaccgagggcaccttctgcccgggggcgaggacgccggtgcggatcagctcggcaatctcgtcggcgaatttctcgtagcgcttcatcttgtcctggccgctgtcctggctggccgtgggcacggccgctggcgcccactctatgcgcgccgggaccgtgttgtcatgcctcatcgcggcctcctcagcgcgccggcgaaacgaaggtgctggtgctgccgaccgccaggctcgggtcgtcgatgccgcgcaggctgaacgccagcggttgcgagccggccctggcgcgttcggcggtagaggccaccgacaccgggaagtcgaggatctcgccgggcttcaggctcagggtgtgctcgccctgcaggcggaactccggcgcgtcgtcgagttgcaggcgatagcgctgcggctgctgggtcttgttgatgaccttgagggtgtagatgttctcgatctgcccggcggcgttctcgcggaacagcccacggtcgcgggtcacgtccagcgaggccagcgggcgggcatccagggcgacgacgaaggcgccgatcatcgccagcatcaccgccgcgtagccgaccaggcgtggacgcaggaagcgggtctggccaccttccagggcgcgttccgaggtgtagcgcaccaggccgcgttcatagcccatcttgtccatgatcgagtcgcaggcgtcgacgcaggcggcgcagccgatgcaggcgatctgcaggccgtcgcggatgtcgatgccggtggggcagacctgcacgcactgctggcagtcgatgcagtcgccgagcccctgggcgcgcggatcgctgcctttcttgcgggcgccgcgggactcgccgcgggcggcatcgtaggacacgatcagggtgtccttgtcgaacatcacgctctggaagcgcgagtaggggcacatgtggatgcacacctgctcgcgcagccagccggcgttgacataggtggcggcggtgaagaacagcacccagaacaggctttccaggtccagctggaagctgaacaggtcggccaccagcggccgcaccggagtgaagtagccgatgaaggtgatcgccgtgaccaggctcacacccagccacagcgcgtgcttggccgttttgcgcaagagcttggcggcgctcgccggaccctggtcgagcttgatccgcgcattgcggtcgccctcggtgaccttctcgcaccacatgaacacccaggtccacacgctctgcgggcaggtatagccgcaccagacgcggccggcgaacacggtgatgaagaacaggccgaaggcggcgatgatcagcagcgccgagagcaggatgaagtcctgcggccagaaggtcgcgccgaaaatgtagaacttgcgttcgggcaggtcccagagcaccgcctggcggccgttccagttcagccacagggtgccgaagaacagcaggaacagcaggccgccgccgaggcggcggaagttgcggaacagaccggtgaagctgcgggtgtagatcgggccgttcaccgccgacggcagcttgccgggcgcgggcggctgtttcgacggagcggccggtgcggcgggctcgacctggatcgcgggaattctttcgctcatttttcgtaggcccatcaggctggagaggcggttgcgactataggaaccggctgatgggcgaaacagcggcagatcgagcgggaaaaaccgtatcagatgcctccggaaagcagcggcccagcattgccgcgggttgccgggcgacctcgggcagtacagatatgcgccccgtggcaaccggtcgcaggcggcacgaattcgccgccgtcggccatctgatgtgtttttttcggcggaatctgccgctgtttcgctgtctgtacgcgggcgatagtgggtgccagtgaacaccggcccatcctgtcgccagaaacaggggcgcagccggtccccggtttcttcgccacgcaccctgcccgtcatcggtggagaaaccctgtcgatgagggctttgcgatgtaccagtacgacgaatacgaccaggcgctggtgagcgagcgggtggcgcagttccgcgaccagatcgcccgccgcctcgacggcgaactgagcgaggaggagttcctcccgctgcgcctgcagaacggcctgtacctgcagaagcacgcctacatgctgcgcgtggcgattccctacggcaccctctcgtcgccgcaactgcgcgccttggcgcacgtcgcccggcactacgaccgcggctacgggcacttcaccacgcggcagaacatccagttcaactggatcgaactggagcaggtcggcgatatcctcgaacacctcgccggcgcgcagatgcatgcgatccagacctccggcaactgcgtgcgcaacatcaccaccgaagccttcgccggggtcgccgcggacgaatggaccgacccccggccgctggccgagatcctgcgccagtggtcgacggtgaacccggagttcctgttcctcccgcgcaagttcaagatcgccctcagttcggcggtggaagaccgcgccgcggtgcagatgcacgacatcggcctgtacctttaccgccaccccgacgccggcgagttgcgcctgcgggtcctggtcggcggcggcctgggacgcacgccgatgctcggccaggtgatccgcgacgacctgccctggcagcacctgttgtcctacgtcgaggcgatcctgcgggtctacaaccgctacggccggcgcgacaacaagtacaaggcgcggatcaagatcctggtcaaggcgctgggcatcgaggctttcgcccgcgaggtggaggaagagtggcagcacctgcgcgacggcccggcgcaactgactgccgaggagtgccagcgggtcgccgagcgcttcgtattgccgcgctacctgccgccggccggcggcgagctggcctacggcagcgcccgtgcggccgatccggccttcgcccgctgggcctcgcgcaacgtccaggcgcacaaggtgccgggctacgcctcggtggtgctgtcgaccaagcccggcgccagcgcgccgccgggcgacgtcaccgcggagcagatggaacgtgtcgccgactgggccgagcgctacggtttcggcgagatccgtgtggcccacgaacagaacctggtgctccccgacgtgcgcctggagaacctccacgcgctgtggcgcgaggcctgcgcagccggcctcggcacgcctaaccaaggcctgctcagcgacatcatcgcctgtcccggcggcgactactgcgcgctggccaacgccaagtcgatccccatcgcccagggtatccagcagcgcttcgaggacctcgaccacctgcacgacatcggcgagcttagcctgaacatctccggctgcatgaacgcctgcggccaccaccacatcggcaacatcggcatcctcggcgtcgacaagaacggcagcgagtggtaccaggtcaccctcggcggcgcccagggcaaggacagcgcgctgggcaaggtgatcgggccatcgttcagcgctgccgaggtgccggcggtgatcgaacggatcgtcgaaaccttcaccgacctgcgggtcggcccggaacgtttcatcgacaccttcaaccgggtcggcctggagccgttcaaggcccgggtctacgccaggatggaggaaccggcatgaacaacctgatccgtttgcgcgatggcgtcgccgaggtctgccgcgacgatccctggcaactcctgcgcgagttgcccgacgcgctgccgccggggccgttgctgctgcctctggcggcctggctggagcgccgcggcgaggccggagccgccgcgccctggctggcgccggacgatgaggtggaggccttgctgccgcacttcgccgagctgccgctgatcgccgtcgacttccccagcttccgcgacggtcgtggctacagcctggcctacctgctgcgcgtgcgcctggggtggagcggcgagttgcgcgcagtgggcgacgtgttgcgcgaccagctcagccatatgcgccagtgcggcttcgatgccttcgcggtgcgcgaggacaagaacgtcgaggatgcgctcaaggggctggcgggcttgagcgtgctctacggccgctcggcgatcgagccgcgaccgttgttccgccgacgctaggcatacgcccccggaccgacgccgatacctgccgcaacgccgacctggcccctctcccgcagcgggagcggggcgcacccctcagccgtagaccgaggaactggcggacggcgccggcgcgccgcccttgaagcgccccgccagctcgcgcagcgaacgcatcagcaggctggtgtccacgcccaccgcgacgaacgcgcagcccagctccaggtagcgccgcgccagtgtctcgtcggcggagaggatgccggcggccttgccggccgtgcggatgcggtggatggcgtcctctatggccgcctgcacctcgggatggcctggattgccgcgatggcccatggctgcgctgaggtcggccggaccgatgaacacgccgtcgacgccctcgacggcggcgatcgcgtcgaggttggccaggccctccaggttttccacctggaccagcaggcacatctgctcgtcggcgtggttcaggtactccgccacgctgttccagcgcgaggcccgggccagcgcactgccgaccccgcgtacgcccgccggcggatagcgcacggcgcgcaccagcccttcggcctgggcggcgctgtcgaccatcggtaccagcagggtctgcgcgccgatgtcgagcaattgcttgatcagcgcagtgtcgccctgcaccgggcggatcaccggctggccggggtagggcgccagcgcctgcaactggccgagcaggctgcgcaggtcgttgggcgcgtgctcgccgtccagcagcagccagtcgaagccggcgttggcggccagctccgcgcagtagggatcggccaggccgagccacaggccgatctgcgcctcgccgctgcgcaggcgttgcttgaagcgattgacgggcaggtccatggaaatgcctcctcagacgaaacggcaggagatgctgccgagcaggtcgtagtcgacgtggaaggtgtcccccggcgcggccgccaccgggcgggtgaaggagccgccgaggatcacctggccggcctccaggcagacgccgtagggcgccagcttgttggccagccaggcgacgcccttggccgggtggttgagcaccgcggcggagacgccagactcctcgatcacgccattgcggtagaggatcgccggtacccgccgcaggtcgatatcgcctggccgcacggcccggccgcccatcaccacgccggcgttggcggcgttgtcggagatggtgtcgaagaccttgcgcgtgactttcgtttgcgggtcgacctgctggatgcgcgcatcgatgatttccagcgccgggatcacccactcggtggcctcgagcacgtcgaacagggtgcagcccggtcccttcagcggcttgccgaggatgaacgccagctccacctcgacccgcggcacgatgaagcgctggaaggggatgtcgctgccctcctcgaagaacatgtcgtcgagcaaggcgccgtagtccggctcgctgatgttcgacgagacctgcatggcgcgcgaggtcaggccgatcttgtggcccttgagcacgcgcccgtcggcgatcttgcgctcgacccaggcgcgctggatggcgtaggcgtcctcgatggcgatgtccgggtagtcgagggagaactgccttacctgctggcgcgagcgttcggcggcgtcgaggcggttggcggcttcctggatcagacggggatcgagcatggtcggggtctctcggttcagcgtgggttgaccacggcggcgggggtccgcaggaccaggccggcgccgagggcgatgaggatggccagcaggtacagggccaggctggcgctctgggtggtgtcgcgcatccagccgatcaggtagggcgcgaggaaggcggcgatgctgccgaaggaactgatcagggcgattccggcggccagggtggcgctggaaaggaaggccggcggcagttgccagaacatcggcagggcggcgctggcgcccatcccggcgatcaccaggccgcccatcaccagccaggcgctggtcggcgccagggccgccaggctgagcccggcggcggccatcagcaacggaatgcccaggtgccagcggcgctcgcgcaggcggtcggaggaacggccgatgaagatcatgaaggcgcagccggcgagatagggcaccgcgctgagcatgccgatgcggctgtcctgggcgatgccggcgccatggatcaggctcggcatccagaacgcgatggtgttcaccgccagcatcaccgcgaaatagatcgccaccagcagccacacctgcggattgctgaagatgccggagaaggaggtgatggtcttgcgctgctcctcgccggccagttcctcgcgcagcaggtgcttctgttcgtcgctgagccacgtcacccgttcgaagctttccggcagcgagcaccagaccaccacgccgagcaacacaaccggcaggccttcgatcaggaacatccactgccagccgcgcagtccgagggcgtcatggaagccttctaggatccagcccgaaagcggtccgccgatcaccccggccatgggcacggcgatggcgaacagagcggtgatctgcccgcgtcggcgcgccgggaaccaacggttcaggtagaccaggataccggggaagaagccggcctcggcgacccccaggagaaagcgcagcaggtagaagccgcgcgcggtctccaccagcagcatggcggtggagagacagccccagaccagcatcaggcaggcgatccagcggcgcgggccgatccgttccagcatcaggttgctgggcaggccgaacagcgcataggcgatgaagaacagcccggcgccgagaccgtagacggtgtcgctgaagtgcaggtcggcgctcatctgcaacttggcgaaaccgatgttgatgcggtccagatgggcgaagacgtagcacaccagcagcagcggcatcagccgccaggtgacgcggtcgtgggtgctgtcgctgagaggcagggtggtgctgttcagggtgctggctgtgctcatgatcttgtactttttgtgagcgcccggacgtcccggcgacctgtcggtggccgggaggcgagctgggtgagtgcagcgttatggcgggctggtcagtccgccgggttgttcaggaattcatgcacgttgttgcgcttgtagttcagctccgcgtccagttcggtgagttcgaaggacagcgccagcaggcgtcgcgcctggagctcggcgaagtgcgcggtgatcacctcgaaaagtgcctcggcgacttgccggcgagtctccaggtcgcgaccggcgccgactttcagggtcatgtggacgaaggcgtagtcgtgcctgccgtcggccatgcgccaggtgtccaggcgcacgccgcggctgcggatgccgccgagcgggaaaacgccgctggcgccgaggcaggcgtggaccttctcgaacaggccgggcaggtcggcttcggcttcgatgttgtcggtgtattcggcgatgaagtgcggcatggtggcgtcctcagaggcggctggcgcaactggcgccggccgggttgccggcctgggcggcggggatcgccgagccgtcctgggcggtgaccgggaataccgcgttgatctgcccggtgccggaggagccgaagtagggcgtcacgacctccgccttgccgtcgtaggccgaccagccgagggcgccgaggagcatcgcggtgtcgtgcatgaagccttcgccatggcccttggaggcgtactcggggagcatcccgcagaactcggcccagcggccctcctgccacatctgcacgacttcatgatcgagaacctcgaggaacgggctccagatgcggtcggagaagtccggcgcctggccgttctgggcgaagcggtgggacagcgagccgctggcgaggaacgccaccgtgccgtcgtagtgctcttccaccgccttgcgcatggcccagcccaggcgcgcgctgtcgttcaggtaatgcacggtgcacagggcggagaccgagaccaccttgaagtggcggtcctggttcatgtagcgcatcggtaccagggtgccgtactccgggccgagggtggtggcgtcgtgggccagggtctccacgccgagcgtgttgcagccctcggcgaggatgcggcccagctccgggttgccggggaagccgtactccatgttggcgatgaagtgcggcaactcgttgctggtgtagagcccctcgaagtgcggcgcgcagttgatgtggtagccggcgttgaccagccaatgggtgtcgaacaccacgatggtgtcgacccccagttcgcggcagcgccggccgatctcgcggtgcccgtcgatcgccggctggcggcagccgtggcgcgggccgggcagctcggataggtacagcgagggtacgtgggtgatcttggcagccagagcgactttgcccatgacgattctcctggtggcccgttgggcctggcagcgggcgcggccgttggcggctggcccggattcttctgattgtgtctgcacgccggcgctgctggcgggctcgggcggccgctctgcacgagcgcgccctacacgccccagcgggggatgtgatggctgcccatggatatacacacgttcttgatctcggcgaatacctcgaagctgtattccccgccttcgcgtccggtgcccgaggccttcaccccgccgaacggctggcgcaggtcgcgcacgttctggctgttgatgaagaccatcccggcctcgatgccgcgtgccaggcgatgggccttgccgatgtcctgggtccagatgtaggaggccaggccgtattccacgtcgttggccaggcgcagcgcctcggcttcgtccttgaacgggatcaggcagaccaccgggccgaagatctcctcctgggcgatgcgcatgcggttgtccacgtcggcgaacaccgtgggctggatgaactgccccttgctcaggtgcgccggcaggccggccggacgctccaggccgccggccaccagggtggcgccttcctcgaggccgatgcggatgtagccggtgaccttgtcgtagtgggcctgggtgatcatcgagccgacctgggtcttcgggtcctgcggatcgccgacgatcaggcgcctggcgcgcgcggcgaactcggcgacgaactgcgggtagacgctttcctggacgaagatgcgactgccggcggtgcagcgctcgccgttcagcgagaagatggtgaacagagcggcgtccagcgcccgctcgaggtcggcgtcttcgaagaccagcaccggcgacttgccgcccagttccatcgagtatttcttgatcccggccgcctccatgatccgtcgcccggtggcggtgccgccggtgaaggacaccgcgcgcacgtcgcggtggcgaaccagcgcgtcgccggcgctggcgccgtagccctggaccacgttgaacacccccggcggaatgcccgcctcgtgcaccaggcggcccagctcgttggcggtcagcggcgacagctcggacatcttcagcaccgccgtgttgcccagcgccaggcacggcgcggtcttccaggtggcggtcatgaacggtacgttccacggcgagaccaggccgcagacgcccaccggctggtacagggtgtagttgagcatctggtcgtcgaccggatagctgtgcccgttcatccgcgtgcagacttcggcgaagaactcgaagttgtgcgaggcgcgcgggatcagtacgttcttcgtctggtggatcggcaggccggtgtcgagggtctcaagttccgccaggtgcggcacgttccggtcgatcagctcgccgagccggcgcatcaggcgcgcgcgctccttggccggggtattggcccatttcgggaaggcttcccgggccgccgccaccgccgcgtcgatttccgccgcgccgccgctggcgacctcgccgatcagctcgccggtggccgggttgtagttctcgaagacgtccttgctttcgacctcgcggccattgatccagtgtttgatcattctgcgtgctcctgtgcgcgggcgcggaagaattcggcctcgctgacgattcggttgaccaggcgaccgacgccttccacctccaccaccacttcgtcgccggggaccacgtcggacaggccttccggggtgccggtggcgatcatgtcgcccggctgcagggtcatgaagctggagaagtattcgatcaggtaggggatgtcgaagatcatgtccgcggtgctgccttcctggcgcagctcgccgttgacccaggtgcgcagggtcagccggttcggctcgggaacctcggccgcgtcgacgatccacggccccaccggggtggtggcgtcgcggttcttcacccgcaggttgggccggtagtagttctccaggtagtcgcggatcgcgtagtcgttgcacaccgtgtagccggccaggtagccgagggcgtcctcgcggcggacgttgcgcgccggcttgccgatcaccgctaccagttcgcactcgtagtgcatgtagtcgacgttgtccggacgccagctgacctggcggtggccggtgtaggtgcccggcgacttgatgaacgccagcggttcgctgggcgccttgaacgacagttcggcggcatggtcggcgtagttcaggccgagggcgaacatgctcccggtggccggcggcagccactccacccggtcctcggcgagcagggtgccgtcggccaggcggacggcgttggcgtcttccacggtgacctggtgaacccggccctggtagcggatgcgtgcgtgtttcatggtcggttcctcattccgcgacgatgctgttggcgaggcggccgaggccgtcgatctcgacctcgacgcggtcgccgggatgcacgtcgactcgcccttcgggggtgccggtgatcagcacgtcgccggcgtgcagggtcatgaactcgctgatctcggcgatcagccgcgggatgtcgcgcaccaggttggcggtgttgttgcgttggcgcagttcgccgttgacgtacagcttcagctccagcgcatggggatcggcgatctcctgcgtcggcaccagttgcggaccgaacgggcagaagccgtcgcggcacttggctttcaccgccgggcggtagtagctgtcttccggcaggctgaactcgttgacgatcacgtagccggcgacatgcgccatggcctcttcctccttcacccggctggcgtcgcgagcgatcaccacgcccagcgccgggcccggttgcaggcgctcgacgccgcgcgggaagagcaccggggcgtcgtgctcgttgcgggtattcggtgtcttgatgaacaacaccggcttcactggcggcttctggtagggcggctgctggaactccggcaggcggctgtcgagcaggcccttgtagttcagcgcgacgccgaacagggtgccggcggcgacgtcattcagtgcgcggctcattgtggtggtgtctcctggcgcgataagcgaacggcgagggggccgtcctggcgaaaactcgttaatgtgttaacgttatatttaacatgttaatgatcgtcaaccccggttgctgcgccattcgtcccggggaggtggcaagaggcgccgtctgcggtatacggatgcccgcgacggcttgcgtgcgcagccgggaagaacaacaaagagaagatcgccatgccagagcgccagccgatccccaacatcaacatcgggcaggtctacgaccagcgctatgccgacgccgaggtgcactacgatgcgctgggcaacctggccggattcttcggtcgcaacatgccggcgcaccggcacgaccgcttcttccaggtgcactacgtgaagaacggcgcggtgcgggtctatcttgacgagcgccagtacctggagtcggggccgatgttcttcctcaccccgccgaccgtgccgcacgccttcgtcaccgaggcggacgccgatggccatgtgctgaccgtacgccagcaactggtgtggagcctcaccgaggcagagccgggcctggcgcccggcccgcaggtggcgccggcctgcgtggcgctgggcaacctggagggcggcgcggccgaggaggcggcgcgcctggcgctgctcttcgagcagttgcgcagcgagtcgatggccagccgctccggccgccagcaggcgctgctggcgctgacccggctggtcatgatcagcctgctgcgtctctcggccaattcggtggctgcgcggccgatgcgccacgaagacctgcagatcttccagcgcttcaacgcgctgatcgaggagcgctatgccgagcactggccgctgtcgctctacgccagccggatcggcgtcaccgaggcgcgcctcaacgacgtctgccggcgcatcgccgacctgccgtcgaagcgcctggtgtacgaacggcttatgcaggagtccaagcgcctgctgctgttcactggcggctcggtgaacgagatctgctaccagctcggcttcaaggacccggcctacttcagtcgtttcttcgtgcgttacgcggggctcacccccagcgcttaccgccagcgacaggccgacggggagtcccgtcgctgagcgggtgggcgggtatactcgcgctcccactcgaacaggaagcgtttctccatgcatgatgcagccacctccatgccgccgcaggctccctccacctgggccgactaccttgccggctaccgctggcgagggcagggcgaaggatgttccgcggccactgtccaccgcctggaggctgcgcggcggccgaccctgttcgtcaagcaggaagtgctgtccgcacatgccgagctgcccgccgaaatcgcccgcctgcgctggctgcacggtgccggcatcgattgcccgcaggtgctgaacgaaacccagagcgacggccggcaatggctgctgatgagcgccgtgccgggggacacgctgtccgcgctggcgcagcgcggcgagctggagcccgagcgcctggtgcgcctggtggccgccgccctgcgccggctgcacgatctcgatccggccgcctgtcccttcgaccatcgcctggaacggcgtctggacaccgtgcgccagcgggtcgaggccgggctggtggacgaggcggacttcgacgacgaccatcgcggtcgcagcgccacggagctgtaccgcctgctgctcgaccggtgtccggcggtcgaagacctggtggttgcccatggcgacgcctgcctgccaaatctgctggcggaggggcggcgcttcagcggcttcatcgattgcgggcggctcggcgtcgccgaccggcaccaggacctggccctggccgcgcgggacatcgaggccgaactcggcgcggcctgggccgaggccttcctcgtcgaatacggcggcgatatcgacggcgaacggctggcgtacttcaggctattggacgagttcttctagagtagggccggttcggatccggactggattcggcctgccgttgcacgaaaacgaggtacaacggcatcggccactatcgccaacgccaccgcgcgccctcgctcgttccgcggagtcgccggctcagttcagccggtactgcgccagttccttcgccgaaagcacgcgcatccgtttgggatcggtgctttgcatggcctgtaccaaggtgctggggatatccatttcgcggaagtaggcggcggagtcgtagcgcatgccgttggccgagcgcgagtgcagcgagtcgccgtgggcgtagtagggacggtgcaggccgacgtagccgcgtacggtcttgcgcttgccggccgccagcaggtagacgcaggtgccctggcagacgctgctcgacggcaccagcgcgtcgaagccggattcgcgcagcaggcggcccatgcggatcgcctccggcacgctgccgccgatgctgttcagcaggagcagcttacgcgagtaggttcccggattgttgcgcaaacccttgagcagcgtctcgtagtcgcccggcgcgatctcctccgagacgcggaccgtcagcacccgccccatgctcttgtgttgcagtgaatgcacttcgaccctggccagtgcgggagtcgcgcagaacacggcgaggcaggcgaggacggtccggaggcggaggcggggcatggaacggggcgatcctgtcagacggcgatggctgccgaagatacctgcaagcgttgcattgtgcacggtcctcgtcgtcaggacgaggagccggtctccgcctggcgcaccggcaggcgcaggcagaaggtgatgacgtcgtcgcggcagtccacgtcgatacgcccctggtgggcctgggcgatggcctgggagatgtacaggccgataccgaggccgttgcggttgcgctggttgtccgccgactcgcgcttgaacggttcgaacaggttggccagttgcgcttcggagaggccgctggtttcgttgagcacgctcaggcacacctcgtcgccctggcgggtcagggtgaccagcaccggccggccgggcaggccgtgatgacgggcgttgctcagcaggttggcggcgacctgggcgtagcggtccgggtcgaccacggcacgaacctgcgggtcgatggcgatctcgatcaccaggccgggataggcgacgtcggtttcgcagacgatctgccgcaccagttgcgagacgtcggtgtcgaccgggttcacggtgaggccgatgcccgattgcaggcggctcatgtcgaggatctggctgaccagccgttccatgcggctgctggacgcggaaatgtgttggcgcagttcggtggtgcgggtgtcgctggaggacagcagggccgccgccatggagatcgactgcaacgggttgcgcaggtcgtggccgagcaccgcgatcaggcgctggcgcatgcggtcgacctcggccgcatggttgaggcacagttccatcaggtccaggcgcagcttttcggcgatcgccaggtcggtttcgctccagggcgtggagtggccgcggaccacctcctcccaggcctcgaacgagccgcgtggggtcagccgcggaccggacgggccgatggtcaacagcttttccggcttgccgccccagcggatgcggtgcacttcctcgtggcggaaccagaagatccagcccgattcctggcggtggaaacggatcgccagcacaccgcagcagtcgccgccgtccggagagtccacgctgggctgcggccagttgtcggtgtggtagatgtcccgttccgggtcgcgctgcaggcgttgcaggacattcccggcctggcgctcgaagtcgccgcggatgctcagggtgcggccgccgagcatgaccagggcgccgtcgcagggaatcagtgcggcgatgccatcgtccgggtgggccagtgcgccgaacaggtcgtcggcgtcccgcgcgcggcgagccagggccagcctgcgctcggtggacacgcgcagcagttcggcgatacgcccctgctcaaggcgctcgacgatggcgctgcagacctgggagaagatctggaacgacatgcgcaccgggtagggaatcagcttgggcgacatgtgatggcaggaaaacagtccccagagcttgccgccgaccacgatggagatgctcatcgaggcgcgcacgcccatgttggtcaggtattcgcagtggatcggcgaaacgctgcgcagcacgctgtagctgagatcgaacgattcgttggtctccgggttcagcgcgggaaacacgcgcatcggcgtataggccacgtcggcgatcagcctgatcgggttctggatgtacaggcgacgcgcctgggccgggatgtccgaggccgggtagcgttgccccaggtagctttcgaggtcttcgcgacggctctcggcgaccacctcgccggagtcgtcatgacggaaacggtaggccatcacccggtcgtagccggtcatccggcgcagttcgtcggtgacgttgctgagcaggctggcggtgtcgttgtgcaactggacctgggcgatgatgcgctgggcgttgagggtgaaggaggtgatcgacagcgtgtccgcggtgcggatctcgaactccaggtagaacacttccttgtagctgtggccgatcacgtcgaacaggtgttcgccgatccgcgtctcgacgctgttcgaccatgggccgttgccggtcagtccctcttcgagcatgcgcaggacctccggccccacctgctcctgcgtcaggtaggaacccggcgaggcgacgaaacccagtagcgcctggatgttctcgcttgccgcgaggaccatgccgtccgcgcgcagggtgaccagcgccccgtgcggctggatcgcgccaggcacgtggatgggttcgtcctcgcagttcgccagggtaaccggggtgatgctcgtcatctatcgtccagcctggtctccaggcagtcaggcttcgtcgagaacccatcgacgaaacgaaaggaatgtagcctgtgccgcatcctgcgcaaggccgatggcttcggggctgtcgatctgccgggcgagctgttcgagaaactcctgccagcgcaccccggttgcctggccgtagccctgcaaccactgtagcggcagaccgggcaggcgtggagctagtcgtttgtagagatacgcgccgcccagcgtcgcgccttccatcacgtaggccaccccgaagacctccgcggcccgtgtcgcattcggcaggtcggcgcagcgcggtagcgcctccacctgcgcgcggctcatgccgccggccagcaggtcgctttccagccaggtgctcttgaccagccgcgcgtcggcccgcagcgccgccggccagccgctgcggttgtcgcgcagcgcgcgctccagaggctccagccagccaaggatgcgtccggcatggtcgaggtaggcgcggtcgtcgagatcgtcgtcgcccaacggcgaacggcggtccagttctgcgtgcaggtcacgggtggcgtcgcggagtgcggcgagggctggcgatggagatggggacatgaggtcagggccagcgattcgaggcatgaacggaaaagagtagcaggaagccgtacgcccggctcggaataaatgggcatccccgcgcgcggcgcagggatgccggagcgggcgcgctcaggccgcctcggtctgcaccacccggtagcaggggacgtaggccgcgccgccgggcagcttcatccggtgctgcttgacgaaggcctgcagcaggcggtccagcggcagcatcaccgccgggtcgccgtggatctcgtagggcccgtattgctcgatcatgcggatgccgttgtccttgacgttgccggcgacgattccggaaaacgcgcggcgcaggttggccgccaactcgtggggcggcaggctgcggctgagctggaggctggccatgttctcgtgggtcggctcgaacgggcgctggaagctttcatcgatcttcagcatccagttgaagtggaaggcgtcgttgcgctcgcggcggaactgcttcacttccttcaggccctgggccatctgcttggccacctcggccgggtcgtcgatgacgatccggtagtggcgctgcgccgcatggccgagggtcgccccgacgaattcatggagctgctgcaggtaggcttcggcgctgcggggaccggtgaggatgaccgggaagggcaggtcctggttgtccgggtgcatgaggatgcccagcaggtagaggaactcttccgcggtcccggcgccgccggggaagatgatgaccccgtggccgacgcggacgaaggcttccaggcgcttctcgatgtccgggagtatcaccagttcgttgacgatcgggttcggcgcctcggcggcgatgattcccggttcggtcaggcccaggtagcgaccgccgacgatgcgctgcttggcgtggctgatggtggcgcccttcatcggtcccttcatcacccccggtccgcagccggtgcagacatccaggctgcgcaggccgagttcgtggccgaccctcttggtgtacttgtattcctcgctgctgatcgagtggccgccccagcacacgacgatcttcggctcgacgccggggcgcagcgtacgggcgttgcgcagcagctggaagacgtagtcggtgaggccctgggagctgtccaggtcgacgtgctggctgtccagcccgctctgggtgtagacgatgtcgcgcagggcgctgaacagcatctcgcgggtgctggcgatcatctcgccatcgacgaaggcgtcggccggcgcgttgatcagctccaggcgcacgcctcggtcctgctggtggatacgcacctcgaagtccttgtaggcgtcgaggatggtcttggcgttgtcgctgtgggcgccggtattgaggatcgccagggcgcactggcggaacagttggtaggtcttgccgttggcggtttcgctcagttgttgcacttcgcgttgggagagggtttccagcgtgcctttcggactgaccgaggcgttgatcacagggcgatgagacatgtgcgattccatgcaggggacgcggcggcgtagaagaaccgccgcatccggataagggagcgccgggcaggttgcgtgccgggggagagggcgatcagccgtcggagtggggcgacgaggcaaccgtgcgctggggcttggctccagggtcttggttaaatgtaatagcgagaacctgactgatctgacaaggaaaatctcgaatttatctgtcgccggcctggcaccggggaaatcctgccactagccatgggcgaaaaaatccggcatcggctgggataatcgactcttctcctgatatcgttgcgtttccgccggatgctcggccagtcaaagggaggaacgaagcatgtcgtatgaacagtccagcagcgtacctagcgactttctttcctcctttttccaagagcctgtcatccatgatcgaactcagaaccatcacccgcgacgactgggaaacctgcattgacctgaaggtcgcccgccaccaggcgcacttcgtcgcttccaacctctattcgctggcccagagccgcttcctgccggggttccgcgcggtcggcatccaccacggcgggcgcatggtcggcttcgccctctacggccccgacgccgacgacggccactactggctctaccgcctgatgatcgaccgccgctaccagggcaaggggcatggccgcgccgccctgcaacggatcatcgccagcgtgcgccggacgaggcggcgcagcgatcgcctgatggtcgcctacgccgtcgacaacgacgtggcccgccagctttatcgggacgccggcttcgtcgaacagggcctcgcgccctggggcgagacgatggcctgtctgatgctgccggagccgtcccatcgctccgggacggtcgccggagcgccgggcgggcgtgcagcgcacggcgtcccggcgtagaatcgcgggattcggcagttccctccaatacctataacgaccatccaacgcacatcgccgccccggacccttgcgtccggggcgttttccgtcgtgcgtggcgagggtcgcgggacctgcccgtccgccccctgctccggaaccgaacgccccatggacagcacctccgaaacccgcagcggcagctggctgagcgtgatcgccctggccctggccgccttcatcttcaacaccacggagttcgtcccggtcggcctgctcagcgacatcggccacagcttcgagatgcccacctcgcaggtcggcctgatgttgaccatctatgcctgggtggtgtcgctggcctcgttgccgatgatgctgctgacccgcaatatcgagcggcgcaagctgctggtcggggtattcctgctgttcatcgccagccacgtgctgtccgggctggcctggagcttccaggtgctgatgctcagccggatcggcattgccttcgcccacgcggtgttctgggccatcaccgcttcgctggcggtgcgcgtggcgccgccgggacagcaggccaaggcgctagggctgctggccaccggcaccaccctggcgatggtcctgggcatcccgctggggcgggtggttggcgaggccctgggctggcgtaccaccttcatggccatcgccggactctcggtgctgaccttgctctacctggcgcgctccctgccgctgctgccaagccagaactccggttccctgcgcagcctgccgatgctgttccgacgcccggcgctggtttgcctgtacgtgctgaccgtggtggtgatcagcgcccagttcaccgcctacagctacatcgagcccttcgccaagcaggtggcgcagatgagcggcgaggcgaccaccctgctgttgctgttgttcggcggcgccgggatcttcggttcgatcctcttcagccgctacagcgaggctttcccgcgaggcttcctgctggccgcgatcctcgccttgggcagcagcctggcgctgctgttgccgctgtccgcgcagccgacctggctgatggcgctcagcctgctctggggcatgtcgatcatgtgcttcggcctggcccagcagtcccgcgtcctgcgcctcgcctcggacgccaccgacgtggccatggcgctgttctccggcctgtacaacgtcggcatcggcgccggcgcgctgctcggcagcgtggtcagcgaacgcatgggcctggcctcgatcggcaacgtcggcgccgcgctggcgctggccggcctgctgctcgccctgttcgccgcactgcgctacgcggaggcgctgaaaaccacgtcgttgtgagtgctcattcactggcccggatgattcggcggaggaatccgcccgcttgatctagtcttctgtgacgaaaaggcgcagggagtgcgggattgccccgcgccgggccggcgcagggacggaatatcgggtgaacgtacaacagagcaagttcaggctgagccgctgggcgggcgcgacactggcgctcggactgctgctgtccgggctgggcgcctgggggctggcgctggtcaacgagcaacaggcgcggatggcgctggaacgcgaggcggaactgctggccgaggcggtgacccgccgcgtggaactctaccagtatggcttgcgtggggtgcgcggtgccttgctgacggcgggcgaggcgcacatcgaccgcgaactgttccgccgctacagcctgacccgcgacatcgaccgcgagtttcccggcgcccgcggcttcggcttcatccgccgggtggcggccgccgacgaggccgggttcctgcgccaggcgcgggccgacggccagccggagttccgcatccagcaactgactccgcacgatggcgagcgctacgtcatccagtacatcgagccggtggcgcgcaacggccaggcgctgggcctggacatcgcctcggaagccaatcgccgggaggccgcccgcgccgccctggagaccgggcaggtgcgcctgacggggccgatcaccctggtccaggccagcggcttgcgccagcaatcgtttctcatcctgatgccgatctaccgcagcggcatcactccaccgccggggccccagcgcgaactcgaaggcttcggctggagctatgcgccgctgctgaccggcgaggtgctggccgggttgcccatcgacaacgcggcgatccacctcgaactcagcgacgtcaccggcgacggcgctgccgtgcccttcttcgtcaacggcgccgcggcgccggctcaacgcctgttcggccacatgctgcggcgggagatctacggtcggcactggcagatggcgttcagcgcactgccgctgttcgtccagcgcctgcaccagccttcgccgcgcatcctgttcctggccggcagcctggtcagcctgttgctggcggcgctggtcaacgccagcgccctcggccgccagcgccggcatcgggaggcggcgacccaggcgcggctggcggcgatcgtcggcaattcggcggacggcatcatcggcgtcggcctcgacggcgtcatcagcgactggaatcgcggggccgaggcgttgttcggctaccgcgaggagcaggcggtcgggcggcgggtggtggacctgctggtgccgccatccaaggagaacgaggaactcgacatcctcgcccgcatcgcccgtaaagaacaggtggtcagcttcgataccgtgcgccggcaccaggacggccacctgctcgatgtggcggtgaccgtctcgccgatcctcggtccggacggcggcgtggtcggcgcctcgaagaccgtacgcgacatctccgcgaagaaggccgccgaggcccgcatccgcgaactcaataccggcctggagcaccagatcgccgagcgtaccgccgaactgcgtcggttgaacgtactgctcggcagcgtgctgcaggcggcgtccgaggtgtcgatcatcaccctcgaccgcgacggcatcatcagcggcttcaatctcggtgccgagcggatgctcggctaccgcgccgacgaggtggtcggcaaggcctcgccgaccctgctgcacagcgagcgggagttgctcgcccgcggccaggagctgggcgaggagggtttccgcgtgctggtggcgcgggccgaacaggagggcgccgagacccgcgaatggacctatctgcgcaaggacggctcgccgctcagcgtgacgctttcggttaccgtcctgcgcgacgaggctggggcgatcaacggctacctgggcatcgccgtcgatgtcaccgaatggcgcaacgccgagcgcgagatggccgcggcgcgcgaccagttgcaaatggccgccgacgtggcgcgcctgggcatctggcgctggaacctggccgacgacagcctgcagtggaacgagcgcatgtgcgagctgtatggccagccgctggcgttgcgcgacggcggcctggtctacgagcattggcgcagccgcctgcatccggaagacctcgagcgcaccgaggccagcctgcgcgcggcggtggaggggcgcggcaactacgatgtgatcttccgcgtggtgctgcccgacggcggcatccgcttcatccaggccggcgcgcaggtcgagcgcgacgccgacggcaacccgctgcaggtcaccgggatcaatatcgatatcaccagcgaccagcaactgcaggcgcgcctgcgcgaggccaaggagcaggcggacgccgccagcgcggcgaagtcgtcgttcctggcgaacatgagccacgagatccgcacgccgatgaatgccgtgctgggcatgctgcaactggcccggcagactgatctcaacgaacgccagcgcgactacctggacaaggccagctcggcggcaacctcgttgctcggcctgctcaacgacatcctcgactactcgaagatcgaggccggcaaactggtcctggaaatgctccccttcgagctggagccgctgatgcaggacctggccgtggtgctctccggcaaccagggcgacaaggacgtcgaggtgatcttcgacatcgatcccgagctgcccagcgcggtggtcggcgaccgcctgcgcctgcagcagatcctcatcaacctggccggcaacgcactgaagttcaccgcccgcgggcacgtcctggtgagcttgcggcgtctggcgcacgacgcccacctggtgcgcctgcgggtgctggtggcggacaccggcatcggcatcagcgcggaacagcagcagcgcatcttcgaaggtttcacccaggccgaggcgtccacctcgcgacgcttcggcggcaccggcctcggcctgttcatctgcaaacgcctggtcgacctgatgggcggtgaattgcgggtcgagagcgcgccgggcagcggtagccggttctggttcgacctggacctcgacgtcgcccacgaccaaccgctgcgtgcggcctgccccggggccggcgaaccgctgcggctgctggtggcggacgacaacctggtggccggcgagctgctcgaacgcacggtcggcgccctcggctggcgcgccgactgcgtcggcagcggcagcgaggcggtggcgcgggtccaggcggcgatggccgagggccgtcgctacgacgtggtgctgatggattggcgcatgcccgatctcgacggcctcagcgcggcgcaactgatccgccagttgcagggcgacctgccgccgcccatggtgatcatgatcaccgcctatggccgcgaggtgctggccgatgcgcgcgaccacagcgcgccgcccttcgtcgattttctcaccaagccggtcacgcccaagcaactggccgactcggtgctgcatgcgttgcacggcgaacagggcgccccggccaacccgccgccgcgcccggtggagcgcacccagcggttgcggggcgtgcgtctgctggtagtggaggacaacgcgctgaaccgccaggtcgccgccgagctgttgagcagcgagggcgcccgggtggccctcgccgacggcgggctggcgggcgttcagcaggtgctggaggcgagcgtgccgttcgacgcggtgctgatggacatgcagatgccggatatcgatggtctcgaggcgacccggagaatccgcgccgacgggcgcttcgccgggctgccgatcctggccatgaccgccaacgcctcgctggccgaccgcgaagcctgcctggcggcgggcatgaacgaccatgtggcgaagccgatcgacaaggagcgcctggtgctttgcctgctcggtcatctcggcaggagcggcgccaggggcgcgccggcaacggcagcggacgcgggcgaactggtcgaggcgcggggcgatatcgtcgggcgttttggcggcagcctggagctgatcgtccaggtgttgcggcgcttcgttccggacatgcaggacctcttcgcccagctcgaacgccagctcggcgagggcgatgtccagggcagcgccgcgaccctgcataccatcaagggcagcgcttccaccgttggcgccagcgccctggccggccgtgccagcgagctggagcaggccctgcgccgcgccgatccgctgcgcggcatggaaatcctcgccggcatccgcctcgacgaactgcgcactctgtgcgatgcctgcctgctccgcctgcaggcgatgttcggcgacgtgcagacggagtcggcgagctgaaccccggcgcggtggccagtcccgccaaggattcaggcggacccggggctcgcctgcatccgctgcggcctgtagggcgaataacgccatgggcgttatccgccgatactcctgaagcccgcccaggtcttgagcgacatcctcttcctgtcgttcagtgccttcaggcgtcgcgcagcaggtcgtgggcgttgagcagggcgtaggcgacttccgggcgcttctccaggccgcggcggatggcggcgggaatcgcctggcgggtcttgcggcagagccccggctgctcctcgaagcgcatgcggatgccgcgcatgctgcgcacctcgccgaaggccggggcgatccgcaggcggatgcccagttgttcctccatgcgccgcagcaggtgttccaggtcttccaggctgcgcagggcttccaggcgggcggccaggcgctgctcttcctggcgggtcaggaggaggatgcgacggtccgcgccgggcgcctccaggcgctcgcgttcgcagacgcaggcgccgggcgggcagggctggcggaggggcggggaagcgctcatggcaccatcatagccaggaccggcgtcccgcgccgctacgctccgtcgccctcgcgagcgcgcttcagcgcttcagcggcaccttgccctgctgctccaggccgctgaggatggcgtaggcgatcttcacccgctcggcattgggatagttgcggttggccaggatcaccagtcccaggtcgcggcccgggacgaacgccacgtaggcgccgaagccgttggtggaaccggtcttgttcagcaggcgctggccctccagcgcctgtggcgcgggcagcctggcgatcctgtgcggttgcagcgccatcggcgtcgagttgccggcctgcaggcgcttcagggagatcggccagtcgtaggcttcccagcccaggccctgggtcatgtcgccgaccttgtagtaaccgcgatgggtggcatcgagcgcctgcgcccagggcctgtccaggcgctccggatgcaggttggcatcgacgaagcgcagcaggtcggccgcgctggtcttcaccccgtagccttcggcatccagcgggccgggaccgacccgtagcgggcggtcgtccttgccgtagccctgggcgtactgcgccagcgccgcctcgggcacgtcgaggtgggtctgttcgaggcccagtgccgggaacacttgctgctccatgagtcgttcgaacggctggcccaggctgcgcgcggcgagatagccgaacaggccgatgctcgggttggaatagaggcgctggctgcccggcgcgtaggtcggctgccactggcggtagtagtcgcggatctgtgcctggtccttctgcaccgagtcggggaactgcagcggcaagccgccggcggtataggtcgcgaggtcgagcaggctgatgccgtcgaagcggctgccctgcagtgccggccagtgctggctggcgcggtcgtcgaggcgcatcttgtcctgggccagggcatagccggcgagggtggcggtgaaggtcttgctcaccgagccgatctcgaacagggtctccggcgtcacccggcggccgtcctctttcgaggccagcccatagctgaagtaatgcggttctcctttcaggctgatggctacggccaggcccggaatgtcattggccttcatcaccggttgtacggcggcgtcgaccagtgccttcaggcgatccgccggggcctcgccggcaatggccggggtggtggcgaacagcagtgtggaagcggcgatgccgcacaggcaggggaatctggtatcgcgcatgaggattggcgtcctttgtcgttggctgcatgagaaaccgccccgggagcgctccttgatcggcgggcggggaaaatctaggcttgcgcaggatttgcggcaaacgacgaatactcgcggcagccattagaaaaatttggagcagagattggttcgaccccatttgccgctgaacgccctgcgcgccttcgaagcttcggcccggcacctgagcttcacccgcgcggccatcgagctgtgcgtgacccaggcggcggtcagccaccaggtgaagagcctcgaggagcgtctcggcgtggccctgttcaagcgtctgccgcgcggcctcatgctgacccacgagggcgagagcctgctgccggtgctgtgtgactccttcgaccgcatcgccggcctgctggaacgtttcgagggtggccactaccgggacgtgctcaccgtcggcgcggtcggaaccttcacggtcggttggctgctgccgcggctggaggacttccaggcgcgccatcccttcatcgatctgcgcctgtccacccacaacaaccgcgtcgacatcgccgccgaggggctcgactacgcgatccgcttcggcggcggcgcctggcacggcaccgaggcgctggcgttgttcgaggcgccgctgacggtgctctgctgcccggaggtcgccgcccagttgcacagtcccgccgacctgctgcagcacaccctgctgcgctcctaccgcgccgacgagtggccgctgtggttccaggcggccggactgccggcgcacgcgccactgacccggagcatcgtcttcgacacctcgctggccatgctcgaggcggcccgccagggtgtcggcgtggccctggcgccggcggcgatgtttgcccggcaactggccagcgagagcatccggcgtccgttcgccaccgaagtgagtaccggcagctactggctgacgcgcttgcagtcgcggggggagaccagcgcgatgctggcgttccgggggtggttgctggagatggctgccgttgaggcgcgggggagataacggttatgcaggcgattcaagtgtcgatgaagaagtaatcaccttcctcgcgcctttttttatacgctcgggccctcccaaggttgatacggtttgaggcgttggggttgtgattggaattgctgacggcgtggcggatatggaccggctcgtcggcgttgctgatcgctccgctaagcgtcactcccaggctggcggcataggcccggcgtgccgcaacgatctcgctctcgagcatgcctgctttccctgctgcggcaacgacggcaagttcgcataggcggccagccttcctcggggaaaccctcaggtcggcgcctgcggaccacagggcaatcaacgctttggatggagcacagccatttctgctgtgctcttcgattgtctccaggagcggactcatatggcctcttgaaaactgtcggcggattgccagcagtatcgacgatggtgcgcttaaagcaacgcggagcaggcggagattgcggcgaagcggcggataacgcttcgcgttatgcgccctacgggagcggtgctcggcttgcgggcggaaggcgtctacggatttccggttcccgcgtcgaaataagagcccgtggacttggccagtcccgtccacatctcgtcgagattgcggaagttccaggcttccgccggctcgaagccgacgattcggtcggtctgtccggccctacccaggtctaccacctgctgcgggatcggcaccttcgagcgggccgagaagaataccttgacccgtggcgtcagcagcgagcggccgtgttgttcgaggaccacgccgaggcgcccgctttccagcctgaccagcgcgccgaccgggtagatgcccaccgccttgacgaaggcgcggaacacctgcgggtcgaagtgcccgttccattcggccatgcgtcggatcgcctcggcggcgttccagcccttcttgtagggacggtcggaggtgatcgcgtcgtagacgtcgcacaccgcgcccattcgcgccagcaggctgatctgctcctgcgccaggccgaaggggtagccggtgccgtcgatgcgctcgtggtggtgcaggcagacatccaccaccagggcactgacctggcggcaatcgagcagcatccgcgcgccgttctgcggatgccggcgaaccaggccgaactccgggtcggtgagcttgccgggcttgttcaggatcggatcgggcaccgccatcttgccgatgtcgtgcagcagtccggccagccccgcctcgcgtaccagcgggtcgggcagttcgagctggcgggcgagggcgatcatcagcgcacagaccgccaccgaatgcatgtaggtgtattcatccgaggtcttcagccgtaccaggctgagcagcgcgttgggatggcgcagcaccgaggcggagatttcgtccaccaggtccgatgcatgcgcggtatcgatggcctggcccatgcgcgcgtcgcggaacatgctgaccacggcggccttggcacggctgcagagcagggcggcgtggcggatttcctcctccagggcgacccgcgccggcgaagggccggccggcatggtgaccggcaggaccgcagcggccgagaccgccgcttcctccgggaggtcgaggcccttgctggcatcgatccagacctccttcacggcgctttcgcgcaggcgctgcaggtcggcctggctgtcgagcaggaagccacctcttttccagaacgggtggtccagccacgagccgcaaaggctctggacgaacataccgaggcgaagctgggttaccggaatgcgtttcagcacgatgggctcgacctcgagactgggccaggtggctgtctcctaacggtagccgagatgggccggcgggagtgagagatgcccggcacttcgtcggcatgcccgcgctcgattgcgtatcgctttgtatccatgcgcggtttcgatacctccggcgtacaaatccacgtgtcgggcgatacacccccgatacatctcccaggcgaaatggccacatccgaaccgcggcgcccgggacgaccccagaaggtcccgccgcccggttcgtaccggcgcccaccagcgccgcgcctgcggcccggccgcgtttactgtggagaagaagcatgtccgttttcgattcgcgtcaaaagacttccgccagcctgctcggtgccgtactggtggggggaatgctgctcggcggttcggcgttcgccgtcgagccgctgggccaggggctgcaagtggcggcggcgagcgccggcgaaggcaagtgcggagaaggcaagtgtggtagcggcggctccgcgaagaccccggccaaggccggcgccgagggcaagtgcggggagggcaagtgcggcgacgcctcctttgcccgaaccgacaccgatcacgatggcaaggtctcgcgcgccgagttcctcgcggtggccaaggaccgtgccggtgagttcgacagcatcgatagcgaccatgacggcttcatttccgaagccgaggcctacgaacacctgcgcaagacctacgaggccaacggcaagccgatgcccgccgggctgttcagcaagctggagcaaggccggcactgagcctttccacaccctggcggcgccctctctttcccctgggaacgcgggggcgtcgccgtttccggagctatcccatgaccctgatcgacaacgccgccggcctcggcctgaggcgcggcctgcttccgcaactgctggcgatggcgcccggcgcggtggacttcctcgaatgcgcgccggacaactggatcggcgtcggcggtgccttcggtgccgacctggagcgcctggtggagcgctttccactgacctgccacggtctctcgctgtccctcggcggctccacaccgctggatgccgccttcatcgagcagacccgacgcttcctcgtccgccaccggggcgcgttgtacagcgagcacctcagttactgttccgacgatggccatctctatgatctgttgccgctgccgttcaccgaggccgcggtgcgtcacgtcgcggcgcgcatccgcgaggcgcaggaacgcctggagcggcgcatcgcggtggagaacatttcctactatgcagcgccgtaccgggagatgagcgagatcgagttcgtcaacgcggtactcgacgaggccgactgcgacctgttgctggacgtcaacaacctgttcgtcaacgcctgcaaccacggctacgacgccctcgacttcctcgcccggctgccgcccgggcgggtcgccgcctaccatgtggcggggcactacgacgaggcgccggacctgaagatcgacacccatggtgccgccgtgaagcccggcgtctgggccttgctcggagccgcctatcgtcgcttcggcgtgcgcccgaccctgctcgagcgggacttcaactatccgccgctgggcgaactgctgctggaagtggagcagatccgccaatggcaacgcgacgagggacgccgtcatggatgagcgcctgcgccaacagcagttcagcctcgcccggcacctgcgcgacccgcttggcaatgcgccgccgccggacatcgaagaacgtcgcctgcgggtctaccgcgagctgttctacaacgccatcgaaggcctccttgccagcggcttcccgcgcttgcgcgggctgcttggcgagcagcagtggcatggcctggtgcgcgagttctatcgcgaggagagaagccatacccccctgttcacccgtatcgccgggggcttcgtcgactacctgcggcagcggggcgagtatcggccggcgtggcaagccgagttggcccacttcgaatggagcgaaacgcgcctctacctggccgagcccgacgatccgccgtatcggcgtgaaggcgacctgctcgacggggtgccgctgctgtcgagcctggcgctgccgctgggctatcgctggccggtgcatcggctcgaagaggacgtcgcgctcgccgaagcgcctgcggaaccgaccctgctgttgatgcaccgcgattcctcgcatcgcgtgcataccgcgcgcctgactccgctggcctaccgcctgctggagtcgctggcgagacggcgcctgagcgggcgcgagcacctggcggcgctggcgctcgaggcgcggagtgcgcccggagcgctcgacgcggcggggctggagttgctggcagcgttgcggacccagggtgtcgtgctcggaaccctggaacgcgattgggcgggcggatgacgacgcagcccttgtggagtcgatgcatcggcggatagcgcctttggcgctatccgccctacgtggtgggtgggacggtcttggtgtagggcggataaccgcttgcggttatccgccggggtgggtccggtgtatcggcgaatagcgccgttggcgctattcgccctacgcggtgggtgggatggttctggcttgctgtgaaaaaccccggaggcgatcgcgttccggggtttttccgtggctggccgaatcctagcgggacaggcccaggcgccgcccgagccagtggtccaggctcagcttccccgcccccgccaacagcagcggcagcagcgccgccaggtagatcgccgggagcttgaaattgccgaagccgtggtcggtgatcgagtagccgcgggccagttccgccaggctcgaccactccgccggccagtgtacggcggcggtcgccaccagagtgacgacgatcagcaccagggcggtcaggcgggtaccgaggccgagcaggaggaacagcgcgccgagcagttcggcccacagcgacagttcccagttgaaggcggcgggcaggcggtcgaagggaaaggggaaagccgactggatatcgccgaaccagttctcgccgttccacttttcccaaccggactcgaagaactcccaggccaggaacagtcgcagggacaggtcggcgctccagccgccgcagcggtcgagcagggcgaagggtcggcgccaggcgcgcaggtcggatgcttgcatgatcgatgtctcgttgagggcggtggatgggtcaggccggctgtacgtcgcgacgacgcaagcgcacggcgagcttggcggtgagcttgaggacgatggcggagaagatcgtggcgaacgccagtacgtaccagccgcccatggggatgcgtttgaagaacgacaggcagaagatgcccgccagcacccaggtgccggtcgagtgcagggctttccaggcgcgtgggccgagcagtcgggccggggtgcggaaggaggtgagggtgagcagcaggatgaacaggtagccgatcgagccggggatgttcgccgcgaccgaacggccgctccagaatgtctcggggaacagcttccagtaggccaggatcagcaaggcgtgtactgcgtgggagaaggcgaaggccaggcccaggtagcgcctttcacggagcagcgcgcgggtccccgggccgggcaccagggtcgccagcgaggacgcgaggaaagcggcgaggaacagcgcgaaggaactgcgcgcggtggcgcggatggcgctgcgcaggccctccaccggttgcgcctggagagccaggacgagggcggtcatgcacagcacggcgacggcgaggacggcgaacagtcgccagccgtgccaggcggattgagaggttgggacggtcatggtggggctcctggttgccgggagcggctcggcgatgtgccgccgcttcccgtggccaggagtgttgcaagcgggtttatccgcagtgtgtccgccgagggcggttatgtatcgctctgtacgggcgcctcaggggtccagctcgatgcgcgcgcaaagcccgccgccggcgcggttggccagggtcaggcggccgccgagggccaggctcagctgctgcgcgatggccaggccgaggccggtgccaccggtgtcgcgattgcgcgagttttccacccggtagaagggcttgagcacctcgtcgagttcctcggcgggaatccccgggccattgtccagcacctggattcgcgtgccgccatcggtacggcgttccacttccaggcgcgcggcgccggcgaacttcagcgcattgtcgaccaggttcaccagcacccggcgcagggcgtgcggacgggtgtcgatcaccgcgccggtacggccgtcgagttgtacctgcttgccgctgtcctggtagtcgaagaccaggctgtcgaggaaggcgtcgaggtccacccggcaactggtttcggtgctgccgtgcatgctgcgggcataggccacgccttcgcggaccaggtgctgcatctcttcgagatcgttccacagcttgtccctgtcgctggaggcgtccatgaactcgacgcgcagcttcatccgcgtgatcggcgtctgcaggtcgtgggaaatcgccgcgagcaactgcatgcgctccttgaggtagtcggcgatgcgcgcctgcatggcattgaaggccgccgccgcatgcgccacttcgcgtgggccggtttccgcgagaggctgtgccggacgattcggatcgagatgttccacggccttcaccagccgggtcagcgggccgatggcggtgcgcaccgcgaggccggtgcagagcagcagcaggagcaactgcaccagcagtaccagcggcagccagccggacagcggcaccggggccggcgtgacgtcgatggtcagcgggctgccgtcgcgcaggcgcaggaggacctggaagtgcggacggctgtcggccaccgtgcgcagggtcagcgggtattgaccgtcgagggcgcgttcgatggagtgcgcggcaaccggcgcgtcggccagcgccagcggctggccgggctcgccggcgtcgaggcgatagcggtaggtgcgtcgttccaggcgcggcagccaggcctcgcgctcggcgggcgtcaggcggtcgagcatggctaccgagatcgccacgtcctgttcgaggctgtcgagcatcatgtgcttcgcggtctggtagcgctcgtagaactgcgaggcgaaggacagcccgtaggccagcaccagcccggcgaagaggatcagcgccaggcgcgcggcgaggctgcgcgggcgcggcacggcgagcttcatggatgggcctcgaccagtcgcaccggcagcgagaacacatagccctcgctgcgcacggtcttgatgtactccggttcgcgggcgtcgtcgccgaggcgttggcgcaggcggctgaccagcaggtcgatggagcggtcgaagatgtccgcctcgcggccctgggtcaggttgagcaactggtcgcgactgagtacccgttgcggatgatcgaggaacacccgcagcaggcggtactcggcgccgctgagggcgaccacggtgccggcgtcgtcgagcaggtggcgggcgctggtgtccagttgccactggccgaagccgatcagccggctgctctcgctcacggtgaggttcggcggcagcatccgcgtacgccgcagcacggcgttgatccgggcaagcagttcgcgggcggagaagggcttggtcaggtagtcgtcggcgcccatctccaggccgatgatgcggtcggtctcgtcgttgcgcgcggtgagcatcagcaccggcgtggccttgtgcttgccgacgcgcagctcgcggcagagcagcaggccgtcgtcgccgggcatcatgatgtcgaggacgatcaggtccaccgtgttggcttcgaggaacgcgcgcatctgccggccatcggcgacgatggtggtgcgcaggccgttcttcttcaggtagttgcctaccagctcgcgaatctcgcggtcatcgtcgacgatcaggatgtgatcgacatgctccattgcctggctcccgtggcggttggtgtgcttgcaagcagtgtatccgcgcccgcggcgcttgcctgccggggtttgtattgcactgtatccggagccggggcgaataccggggcgtgcaaaaaagcccggttgtcgctgtcgcgaacgggggagacgacggatggcgccgggcgcgattcgtccggcgggagcggggcggcgaatgtacggccatgtatcggccggcagcggcgatacagcggctgacgaatcgggcattccagcgacacatccgggacaactccgcggcctggaataggcctcgacgaaggcatgtcgccttccaccgacgcggtcctgccgccaggagatcccccatgactcgcaccctgctcgccaccaccctgctcgccgcgcttgcgcttcccgcgttcgccgcccaggccgccgcaccggtaccgaccgaaagctaccgctacggcatgccgctggatgtgcacaaggtggtggcgacccaggaacaggcgtcgaccacctgcgagatcgtcgatgcacggatggactacctagactccgccggcaagctgcattcgctggcctaccgcaagtacgccagcgcctgcagccagggcggctagtcaggcgccggccagagcctgcacggccggttgtcgcgcgggcggtgcatggggcgccggcttgccgaggatcaggtcggcggccttctcgccgatcatgatcgccggggcgttggtattgccggtgatcagcgtcggcatgatcgacgcatcggccacccgcaggccttgcaggccgtgcacgcgcaactggtcgtcgaccaccgcgagctggtcgtggcccatcttgcaggtgcccaccggatggaacacggtgcccaggttggcgcggatccaggcctcgatctggccgcggctggaaacctgcgggcccggtaccagctcgcccttgaggtgacgggcgaagctgcggctggcggccagtttgcggaccagttggaaaccccggaccagggtatcgaggtcggcagggtggctgaggaagttggcttcgatcagcggccggtcgtgcgggtccggcgagttcaggcggacccgcccgcggctctgcgggtgcatcaccgcgacgtgcaggctgaccccgtggccgaaggggaccaggcgctgcggctggttcttcagcgcgggggcgacgatcagacccagctccaaggtctctgcctgcgggtcgaggcggaggaagccaccggactcgacggtgttcgaggtcagcgccccgcgccggccgaacaggtactgccagggcgagcgcagcagcggcagccagcccttcggcgagaagcccaggccgtagccgagcttggcctcggtgcggtacatcagcacgatgtcctggtggtcctgcaggttctcgccgaccccaggcaactcatggcgctggacgatgccgtggcgcgccagttccgccgccgggccgatgccggagagcaacaggagctgcggcgagttgatcgagccggcgctgaggatcacttcgcggcgtgcctgtaattgcacgacctcgccagcctggctgatctccacgccggtggcgcgggtaccttccagcagcacgcgcagggtcagcgccgagctgagcacggtgaggttgggccgcgccagggccgggtgcaggaaggcgcgcgccgcgctacagcgttcgccgttgacctgggtgacgtggaacgggccaatgccttcctggcgctcgccgttgaagtcggcgttgtacggccagcccatttcctcggcggcctggaagaacacctggttgatcgggcccgggctgcgctgcgcggcgacgttcaattcgccgccgcgcccgtgccagggcgattcgcccggctcgaaatgttccgagcggcgaaagtacggcagcagctcgtcgtagctccagccacggttgccgagggatgcccagcggtcgtagtcgtggcggtcgccgcggatgtagatcatcccgttgatcgcgctggagccgccccagaccttgccgcgcgggcaggcgatcggctggttggcggtgccgggctgggcggcgaagcgatgcatccagttccacttcgggttggcgatcaggcggatgatcccggccggcgtgcggatgtaggcggcggggagcggcgtgcggtcgctggggccggcctcgaccaggcagaccgagacggcgggatcggcggaaagacggttggccaggacgcaaccggcggagccggcgccgaccacgatgtagtcgaacgagcggcgggcagtggaagtcatgtcggcacctttctgggtgtgctgccgggcctcgcccggcgttctttttcgccccgcgcccatgggcgcgacgctactccattggacggggaagcgcgcccggccgcttgtcccagcctgccggcggggttgaccgaggctgccaggcggcgcgctaaagccccagcagcgagcccatgtcgaccatcagttgcaggccgacgacgaaaccgtctccgctcagttcgcgagcgccggggttgtagtagttgtccgggttgaagatgtactgcaccgacggctccagcgcgatgtgcggggtcagtgcgatgtgcgcattggtttccagggcgtacacgtcgcgctggccgagtttcgcatcgccgccagcggcgatccgcgcctggcgctggaactccagctggtgatcgttcaggcgcaggtagctggccttgaggttgagcttgtcccgcgtgcggtcgaagggcgcatggtaggtcaggcccagctcggcgaaatgacggaacggctgcttgtcgtcggccgagaccgacagcgagccgaacagccccagcgccctcggcgaatcgaggcggccgccgtcggcgcgccagaacagctgctggaacttgaagaagccgccggcgctgccgtggtcgctggcgccggtgagcgggtcgacctggttggcggtgttcaggtaggcgttgagttcatagtgcgagcggtagggatcgaggctttcctcgcgcttttcgccgatccccagcagcaggctggtgccgctggcgtcgtcggtgccgaaatcgaggccatggcgcttcttcaggtaatccaccgggttggactcgaaggccccggcgtgcaggtacagggtcggggtcgcccggtacttcaggtagccgccccaggcgccgtagggcggcggcaggatgccggtggaggcgtcgatgatcgggtcgttgcaggtgaccacggtctcgcagttgtagatcaggaaatagcgccgcgcattggtccgtccgaggtggctgtcgaggcgtccgcccagccactgctgctgccaggtgagcaggctcagctggttggcgccgatgtcgttgtgcagcggcgcgccgccgaagtagctgcccaccgcgccctgccagctcggcccggtgggctgaccggtgccgcggtcgaggatgaacagggtttcctcgatgtgcagcgaggcgccgtccaggccggcgagggtggcgaggtcgaggtcggcgccgaggaacaggtcgccgctgttgccgaagctgtgctggcgcgggccggtgtcgaggttcttcagcgacaggctccagaactgcgcgtgggtcttcacgccgtggcgctggagtcgttcgccgaacccggccagcgggccgctgcggctgtcttcggcggcctgcgcggagagaccgaggaaaccggcgcagagcagcgccggcaaggtgcggagggttttcatggcaaggcactcgtcttgttgttgttctgtcgtgcgaatcgctgtccgccccaagcggacaggtgcatccggagcgaaggcggctcaggcgcagagatagccgccgtccaccgccagcacggcgccggtgacgaagctggcgccgggaccgcagaggaaggccgcggcgctggccacctcgggcgcctcgccccagcgcgccagcggcgtgcgctgcatgatccggcgggtggcctcgacgtcggccttgagcccggcgcccagcggcgtgtcgatccagccgggggcgatggcgttgacccggatgcgctcggcggcatactcgcaggccagggaacgggtgagctggacgatggcgcccttgctggcgctgtaggccgggcggtcggcggaaccgaaggtgctgtacatcgaggcgatgttgaggatgctgccgccgcgctgcgccagcagcggccgggccagttggctggcgagcatggcggcgctcaggttgaggcgcagcacccgttcgaaggtagccaggtcgtattcctcgcggtcgcggctgatgccggcgttgttcaccagcacatccaggcgcggcagcgcttcgaacagccgttgcaggcgctggctgtcggtgatgtccagttcttcccggcgaatccgcggatgacgcggtgcgtgcacgccgtcggcgtccaggccgagggcgacgacttcggcgccgagttcggcgaactgcatggcgatggccgcgccgatgccggagctgccgccagtgaccagcacctgctggccggcgtagatatcgtgttggaaaaccatcggcgatcgttccttcaggcgtcggccagggccgggttgggattgaccagcaccttgacctgcgacttgtcgcgcagcagggcctcgaaaccgtgctcgacggcctgctccaggggcacgctgcgggtcactgcgcgggccaggtcgaggcggccgtcggcgagcagggcgatcagctccgggtaggcgtcgcggtagccgacgctgccgagcaggcgcagttcgcggttgaccaggtcgaaggcgtccagccggacctcgcccatcaggctcaccagcaccagctcgccacccttgcgcaggctggccagggcggcgtcgaggctggcctggctgccggcggcctcgaaggcgcagtcgagcgcgccgccctcgcgcaggcgcgccgccgtgtcgccgtcgcgggcgtcgagcgcccggctggcgccgaactccccggccagggcgaggcgctcgggactgacgtcgatcgcgacgatgtcctcgattccgcgcaggcgggcgagcatcaccagcagcaggccgatcgggccgagcccgaacaccgcgcagcgctggcccggcgccaggctgctgcggcgcagcgcgtgcagggccacggcggccggttcgagcacggcggcctggcggaagcccaccgcgtccggcaggcggtgcagcatgtaggccggcacccgcgcgcgctcggcgaagccgccgtcgcccatcaggccgatgaagcccatcgactcgcagaggttgtagcggccttcccggcagtagcggcattcgccgcagcggtattccggctccaccgcgacgcggtcgccgatgcgcagtccctccacgccagggccgagcgcggcgaccacgccgcagaactcatggccgagggtcagcggcgcgcggcaaccggacagcgggtgcgcctcggcctggggaatcgagtgcgggccgctctggtattcgtgcaggtcgctgccgcagatgccgcagtaggcgacttccagttcgacttcgccgggccgcggcgcctggcgttccagttcgctcaggcggaggtcgcgggcagcgtgccagcgcagtgctttcatggttggtttccttgcaggacggaggtaggcgcgctgcgctggcgcgccagcacggcgggcgcggtttcgcgcaggaacagcgagaggaacgcggcgagcagggcgccgccgcaggacatccacatgacgatggacaggccgaagcggtcggcggcgaagccggccacggtcggcgcgaggaaaccgccgaccagttcgccgaggcccatgatcaggccgagggcggtggcgatgacgccgcgcgagacggtctccgccgggatggtcgccatgaacagggtgaagcagccgagcccggtgtaggtcagcagcaacagcaggccgaggctggtcgcgttcggcgcatagagcagcgccagcgggcaacacgcggcgagcagggagaacgccaccagggtcggtcgacggccgatgcgatcggatatcgccggtacggcgaagccccagaccacccaggcgacgcccaggcagctcatcagcctgcccatggtcgccgggctgaagccgcgggcgttgaccaggaaggtcggggtaaaggaaatcagcacgatgaaccaggtgacgaatacgcaactgatcagggtgcagagcaggatgttgcggctcttcagcagtgccaggcgcttgcctttcgcttcttctgcgcgcggcgccgggcgctgcgcgcggggcgggtcgggacgcacatggcgccagatcaaccaggcgatcagcaggcccggcagcaacgagacgatgaaggcgtgacgccagccgagggtttcggccagggccaccagcagcggcgggccgatcaccgcgccgagcaggccggccgccgagccctgtagcagacccatgttgaggccgcggcgatgtggcgaggaggcctcgaccatcagcgattgcgagagcggcaggatcggcccctcggccaggcccatgatgccgcggaacagcagcaggctgaggaagccgccgaccagcccggacagcgccgagcacagcgagaacaggatcaccgccacgatcagcagcggcttgcgctgcccgcggcggtcggaccaggcgccgaccagcgcgccggataccgcccaggccagggccagcaccgaggagagcatgcccaggtggctgttgctcagttgcagctcctgttccatgaagggaaacaggaaggacagcgccaggcggtcgaagaagacgaagccgaaggtcaggaacagcacgcagagcaggacgttttcgtaactggcggaattgttgttatgcgccatgtcggtctccaggccgggcgggccggccggcggggaggcgcgcgtccgccagggcggcgcgcgcccggggtcagcggaacagggagtcgatgtaggcggcgccgacgccgatcttgtcgtagtgctcacggcacatcgcgatgtagtcgtggacgtcgaagatgccgtccgcgttgcccttctcgtcgagccagaccagcggtcccttgacgatgaagaatgcacgcatcggctgctcgtgctcgtaggccaccagggtgtggccctcgccgggcgtctcgtagacgaagtcgccggcggtggcggtccagtcgtgttccaggtagccccacttgccgctgatggtgtaggcgaacacctcgtgcgggtggtagtggcggttgaccaggccggcgctcgtcgccatcaggatgtcgcaccagcggttttcgcttggcgagatccacagcggacgcgacttcacggtctcggtgaagggcacgtagaggcgctcgtcctcggtcggcgcgttgcgcaggtagacctcgggcttggcgtccggcttgaagcagtcgggaatcggttgcaggtctttccagaattcacgggtggcgagttcgggcatggggcggcctctgtcgttgttatcgtcgagccgactctagccatgggcgggcctccgggtttgaccctggcggccaggaagcttgcgcttttcggacatggcctggcgcgacccgcgacgcgccgccaagctggcctgcccagcgtcggagccggctggagggcgattgacggaggaaaggattcagatgttaatgacggggtgccaggcgcctcgccgaccgaccgcgacaggtcggcggagcggcccggcgcctggccccggaggccttgcctgaggtccgggaggtccacgcagcgttcgacgagaagaataaaaatgcccgcacatgccttgctcgaaacccggcgggccagcacccaggacattcccctggagcagcggctggcgttctgggaggactacaacgcttccatcctggttggcctgaaatgttcgtcgtattcccaggccggcttcgccgcgacccaggacaacctctgcctcgaacgcctgcggctggcccgcatcggcggcaacgagcacgtggtggagcgcgaccgctcgatgatccgcgcagtgcccaaggagtcgatcttcgtctccctggtgcagggcagccagtcgttcttctaccaggacaacggctgcaacctcctgcaaccgggcgagctggttatctaccggaccgacaagccctacctgttcggtttttccggaccgatgcggcagttcatcttcgacattccccaggacgatttcgccgagcgctgcctgcgcgacttcaagggaccgctgaagatcggcgcggaaagcccggtgcagcgcctgctggtgcggaccctcggcgagcgtacccgggatttcctcgacagcccccatggcgaggatgccgagcgctaccaggaggaagcctacgacctgctggcgagcatcatcagcgaccatgccggcgagcaccgtgccagcgccctgggcgcgtcctacctgctggcggccaagcagtacatccagcagcatctcgacgaacccgccctgagctgcgagcgggtggccgccgccactggcgtctccagccggcacctggcgcggctgttcgcccaggaaggcagctcgcccgggcgctacctgcaggagcggcgcctggagcgggcccgccagttgctcgcttcgccccagggccggcgcctggatgtcgccgaggtcgcctatcgccacggcttctccagccaggcgcatttcgcccgggccttcaaggcgcgctacgggatgacgccgagcgaggcgcgtggccgctagacccgactaccgtacttttcctcctcctactgccaaggacccgttccgtgaccgacaagaaagagcagatcgcccgtttcatccagcgcgaatttccccagacccgggtcgtggtcgaagccgtcggcgagcgtagcgccacggtctggcaggcggtcgacgccagcgacctgcgccccggcggcacggtctccgggccgaccctgatggccatcgccgatgtcgcgctgtacgtggcggtgctgggcgagatcggcatcgtcccgctggcggtgaccaccagcctgaccatcaacttcctgcggcgtcccgcggcggaccgccgggtggtcgccgagtgccgcctgatgaaggtcggcaagaccctggcgatgggcgaggtctcgctgttctccgaaggcgacgcggaaccggtcgcccatgtggtcggcacctactcgatcccgccggcgcaccgccgctgagggcctggccgggttctcggcggcggcttcgaaacgctggcggaggattcctggaggcgccgttcaggccgcccgccgggggcattgcaggcgatggaagctgcggctgaagtagaccaggccgtcgccctgttcgaggacctggatgtcctccagttccagcaacagcaccgagtgggtgccgatctcctggacctcggcgatgcgtccctgcaggttggccagggcgccgtgcagcaccggcaacccggcgaggccctcgcgccagtcgtggagggcgaagcggcgttccatcgggacctcggtcatgccggcgaagtggcgggccacctcttcgtgttcgccgctgaggacgttcacgcagagtcgaccgttggccttgaacaccgtgttcatctcgctgttgcggttgatgcagagcatcagcgtcggcgggctgtcggtgaccgagcagaccgcggtggcggtgatcccgcagcgtccggccgggccgttgctggtgatcacgttgaccgccgccgaaagatgcgccatggcgttgcggaaggcttgctgcctgggttcgagctgggacatggggataacctccggaggcgacgcgggcgtcattggcggatgcgatcgagcacgttgatgtcgtccgggttgtgcaggtgcggcacggtccagccgttctcgtcgtagtcgcccatgcactgctcgaccatgccgagcatgcccttcatcgccccgctgccgatcgcctggcgcagggcctgcatgcggatctcgtcctggctgccggcgtagttgatctcgtacagctcgtggcggccgccgaactcgctgccgatggcgtcccagagcagcttgaggatcttgatccgctcccggtggcccatgccgccggagccgcggcaataggtggagaggtacttgtcgagttgcggattgtgcaggtcgcgaacgccggagggcaggtagatcaggccgctggcgaccacctgctcgatggtcttcttgatctccgggtaggcctgcggcgccagcacgcggtaggcctgcagggcctcggcgctgggcaggaaggcgccgccgtgccattcgctggcgttgccgtacatggcgtcggtcagcgaccagaacaggttgcgccaggccaccacttcgccgacctgcgcctgcacgccgcggaactccagggagccggtgcattgcagggccttgtagagggcgccggtgatgaagtcgagcttgaccgccagacgggtgcagccctgcatcgggaacagccggccgaagccaccctgggggaaccactgcttgcagcgctcgaagtcgcggtagatcagtacgttctcccaggggatgaacaccttgtccatcaccaggatcgcgtcgttctcgtcgaaacggctggacagcgggtagtcgaacggcgatccggcgatacccgccaccagttcgtaggaggggcggcagatcagcttcatgccgggggtgttcatcggcgcgatgaacatcagggcgaagtcggtgttgtcgccgagcagttgcgccgaaccctggccgacgaagttgtagtgggtcagcgcggaattcgtggcgaccaccttggcgccgctgacgacgatgccgccgtcgacttcctcgtccaccgagatgaacacatccttgacctggtccaccggcttgtcgcggtcgatcggcgggttgacgatggcatggttgaggtacaggcaggcttcctggatgcgcttgtaccaggttttcgcgttgtcctcgaaacgcccgtagaagcccgggttggcgccgagggcgctgccgaaggcggccttgtagtccggggtgcggcccatccagccgtaggtcagccgcgaccactcggcgatggcgtcgcgctgctggcgcagttcgtcggcgctgcgcgcgtagcggaagaacttgtgggtatagccgccgttgccggtatcggtctcccagcagagcttttccttgctctgcggatcgtgcagggcgtcgtagagccgggccatggaggcggccgcgttgcggaaggcggggtggctggtgacgtccttgacgcggtcgccgtagatgtagatctcacggtcgtcgcgcaggctggcgaggtactcctcgccggtgaacggacgggtggcagaggcacggaaatcttcgggtttcatcatcgtctccagtcattgttgttatctgcgcgagagcgcctggaggggatgatgggacgggggcggagcgagctgaatggcttttccggggaatgaattgcactttccatggccccgcgtgacgcccggcgcccggccgcgaagggcggccgggtggcggcgcgttcagctttcggcgggctgccaggcaatctccaggctttcgctgttggccatgcgttgcaggtgatcggcgaccacgttctgcatgtgggcgaggctgtcctcgtcggggctgttgagaatcatcaggacatggtcggggtgggcgagcagctcgcagttggagtcgccgaagtcgatgaagccgcgctcgggtgtgagttcgacttcgaacttgtggccccagtgcttgcacaggcgattgacgtagcgtgccgccgattcggtacggacatgggaggtggagcggaacatgaagcgaatcctctcggttggggatttccgatactaacctgctgagagtcattcttattcatccattttgcaggggctttcgataatcgcccggcaaatggtcggcccttgtccgtgggacagggcgagcgccctaccggagccggcggaagtgtttgccggatacgtcggaaagcgctctctctggagggagagggcgaacgccagcggcttcaggccagcccgccgttttccggcagcaacgcgccgccatccacaaccagggtctgcccggtgatgtagctcgcctcgtcggaggcgaggaagagcatggcgtgggcgatgtccagcggctggccgacacgcccgagggggatgtgcgcggccagcgcggcggcgtcgccgaggctgcccagcgccggagtcgcgaccaggccgggctcgacgccgttgacggtgatgccgtcgccggccagctccagcgcggcggcgcggatgaaaccgttgaccccggccttgctcgccgcatagtgcgagagcccagggatcgccgtgcgcgggccggtcaccgaggaggtcaccaggacgcgcccggccacgctgcggcgcagggcgggaagggcggcctgggtcagccggaagcagcttttcaggttcaccgccagggtccgttccagggtgccttcgtccagttccgcgagggcgcactggggaaaggcagcggcgttgtgcaggaggatgtccaactggccgaagcgctccagggtcgcgctcaccgctcgtctcgcggcgtcgtgctcgctcaggtcgacggccagcagttcggccgtgcctccgcccaggcggatcgcctccaggacggcctggccgcggctggcggtacgcgtcgccagcagaaccctggcgccttcggcggcgaagcattcggcgatggcccggccgatgccctggccggcgccggtgaccagtgcgacgcggttctccaagcgcctcacgatgggcgctccagcagttcgcccaggcaatcgcggagcaggcggtcgtgcagttcgacgtcctctgcgcgggtcgccgggcaggtcagcgccatgttgtggaatggcgtcaagagcacgccgcggttgagcaggtagaggtgcaggcaggcctcgatcaggccgttgcgtgcgtggtgggcctcgccgccgttgcgcggggcgtgggtcatgaacaggtactcgacgcgcgcgccgatgcgcgtcacgtgccagggcaggcgcagttcctcgagcgtcgcgcggacgcccgcctcgagctgcgcggcgagctggaacatgtgccgataggcgtcctccgtcatcacttcggcgaaggtcgcgcgcatcgccgccagttgcagcgcgttgccggccagggtgccgccaaagccgaaatggttgatcgcctgccccggtcggaagtgcggcagtaccgcccagatccgctccgcctgcgcctggctgcatccccagacggcgctgggaatgccgccggcgatgcatttgccgaggacgaagaagtccggctcgaggccatgcgcgccgctatagccggcgggaccgcaggagatggtgtgggtctcgtcgatgatcagcgccacgtcgtggcggcgggtcagttcgcgcaggccggcgtggaagccttcggccggcgggaccatgccgacgttggtcatgaagggttcggtgagcaccgcggcgacgtcgccatgggcgagggcggcctccagcgcgtcgaggtcgttgaactccaccaggcgggtggtggcgtcgtggcgtacgccattggggtgaacgcccgcgcgcggaaccatgcgcccggcggcgtcgaattccacctgcgattcgtcgacgctgccgtggtagttgcagttgaacaccaccaccttgtcacgtccgctgagcatccggcacaggcgcaggacgaaacggttggcgtcggtggccgaggtggtcacctgccaatagggcaggccgaagcgccgcgccagttcggcgccgacccacaggctgtcctcggtcggcagcatcagggtcgagccgcgccgcgcctggcgggcgatggcgtcggccaccgccggttgggcgtggccgaacatggcgccgctatcgccgagggcgaagtcgacgtactgctggccatcgatgtcggtgacgcgcgcgccctgggcctccttcaccagcagcgggcagttgcccggccactgttgcatccagtgcagcggtgcgccgtatagccagtggcggcggttttcccggtaggcctgggcggagcgcggatgcagttcgtcgaagcgtcgcagctcgcgcttgaacagcgtttcgacgcgggccaggtcgaggccgaaggtggtgtccatgggcgtcctcacaggtcgtggcgggtctggttgagcacctgggccagggcgccgaccgggaagttcaccggggtggcgaagtcgtcgtcctggtagccgaagatcttgccgtcggtgcgcccggcttccaggtcgatcagcagcacgccgagggtcggcacgatcttctcgcgccagacgaacaggtacaggcgttcggccagtcggtagcagtggcagcggtcggtatcggccagccctcgctcggcgccgcgcaggcattgccaggtgtagaaggcgggattgaggtagatgtgttcgtaggcctcgctggcgctgtagacgtagcggttgcgcaggccgaccaactcgtcgctggggacgtgcgggcaggcgccgggctgccacgggcggtcgaggctgccatgcaggaactcggcctccacgccggtcagttcccggccggccagggcccgggcgaacaggccctgttcgcaggccgcgcggtcgggcagatggccgagcaccgcggtgaacgcctggttgtcgaagtccagcaccaggctgaccgagaccggccggccgttttcctgcttgaggaaatccaccaggtaaaggttttcccgcagtgaactggcgcggtagtccgactcgccgctggcactgccgtcggccaggcgccagcgcaggcgctgcgagtcgaaggcatgttcgatgacccagccgttggcgaagtgcaggacccgttcgagcccggcgagatcgccgcaggcgggaaggacgtggttgtccggggcgaagccgtcggccagggcgccgacggtgatccatccggaatgcgagtgggcggacatagggttctcctcgtcgtgggaaacccatgctggcctgtcttcgagtatcccgatatcgaccggatggttgataggtcgatatgccacggaaatagcacggagcggcgaagggaaagttatcgaaggtgaagtcttagatgagttttcgtttcttctttttttggttttttagttaatgggttcctgttcttctataagcattttctgaatttattcttatgtgcttattggctgttatcggaaatggactacatatgttttcgtatgattattatttttaaatcctgtctttctttctagtatttgggtctgcgtttatcagggcgcaatcttcggctgtcgcgtaatggtcggaggcgctctaggcggccgttccggttgcgcgcaaaggcttggctaccttggccggttcgtactgcatcggctctccagggagcagccaggatgttccacaactccaaaggaaatcagatgaacaagttcaaacgtgcaattcttgcgcccctcgttgcgtcgggcacccttctcgcgctgatgtcccccgcggcccatgcggtcgatgggatcgtcaacttctcgggcaacatcactgacgtcgcgtgcgatatcaacggccaggcgccgggtgcgggcaacgtcaccaacgtcgacctgggtatcgtggcgccgacccatttcaccgccgtcggaaccaactccactttccaggagttcgatctggtcctctccggtgccggctgcaccaatgacaagaaggtttccatcgccttcgatacggtcaccaacgtcgaccgtatcagcggcaacctgatgctgatggggccgtcgaaagccaagggcgtgcagatccagatcttcaacaattcggcggccaacaccacgaagatcccgctgggcttggtcgaggccgccccgcagaaggcaaccatcgacaagaacacggcgaccctgaagtacaaggcctcctatgtgtccaccgagaagaccgtgatcgcgggtaccggcctgtcccatatccgctacctcctggcgtacgagtaagcggcggtcgacggacgaagaggtgaggccatggcgccgctaatgcatcgttttcattctttcgtggcggcaagcgccgtggccatcgccctgtgcgccggaacggctcatgccgggctgatcgcacagggcactcgcgtcgtctttccggccagcgagcgcgaggtcaccttgcgggtcagcaatacctccggcactcccgtgctggcgcaagcctggatcgacgatggccggcaggacgttccccccgaggaactgcaggttcccttcagcgtcacgccggccgtgacgcgagtggaccccaatggcggcgctgtattgcgcatcgcctacctgaaggccccgttgccgacggatcgcgaatcgctgttctggctgaatatcctggaagttccgcccagggacgaagacgaaaacaatgcattgcagttttcctttcgttcgcgcttcaaactcttctttcgacccagccagttgaagagtgtcgattcggctgccgggaaacttcaatggaagtttttggagtcagggggagcaggaaaaaagaccgtagtacaggtaaataatccgacgccttactacgtttcgttcgccagcgtcgaattgattgtcgatggccgtgtcatgtccgtgggaaagggaatggtcgcgccattctcgacgaaggagttcgactggcagggaaatccgaagaacttggaagccgcttccgtcagatacgaagtcatcaacgattacggtggccgcaatactctcgatagggcactcggcaaataacccctccgtttccccgctttctacttacggcccgacatatgagtggcgattttaaaatcgctgcagggattacatatgcccaaagtttctcttcataggtgcctttccgctcccgcttacggtgggcaggtcgccctgttgcgaatggcgatgcagggagggatcgccgttcgttccctgcgattcgcctgtctgctggcactgtttccttcgctgtcctcctgccagtcctggtcctccgtcggcgccgccggcgtagccggggcgaaggcgaaggaggccaggacgggagcaccggcgaaacagccgcaggcgcccgcggcggccgttgcgtcaccggccggtgggttggacgcaccgtcgcggcggatcgtcttcgacgcgcagatgctggccctggggccgggcggacgctcgatcgatacgtcgcgtttcgagcgcggcgacgtcatcgagccaggccgctatcgcctcgacctgctgctcaacagccgatggcgtggcgtcgaggaagtcgagctgcgccgccagccggggcgggaaagcgcggtcttctgctacgaccggggcctgctggagcgggcgggcatcgacctggagaagagcgcgcgtggccaggaccgttcctcggctcgcgatcctctgcccgaaggtttgcactgcgacccgctcgagcgctatgtgccgggggcccgggtcaagctcgatatcgccgagcagtcggtctatgtctcggtgcccagctattacctgagcctggattcttcgaagacctatgtcgatccggcgagctgggacagcggcatttccgccgccttgctcaactacaacagcaatctccacgtcagggaaaaccacggcaggagcgccaccagcggctatgccgggatgaacgccggcttcaatttcgggcgggcgcgcctgcgccacaacggcacggccacctggtcgcgccgcatgggcagccattaccagcgtagcgcaacctatgtgcagaccgacctgccggcctggcgtgcgcagttattgctgggagaaaactccaccagcagcgagttcttcgatgcggtgtccttccgtggagtgcagctttccagcgatgaccggatgctgccggattcgctgcgctactacgctccggtggtccgtgggaccgccagtaccaatgcgcgggtatcggtctaccagcgcggctacctcatctacgaaaccacggtggcacccggggcgttcgctctcgacgaactgcagaccgccagctatggcggggacctggaagtgcgggtgaccgaagccagcggggaagtccgcagtttcatcgtgccgttcgccaccaccgtacaactgctgcgccccgggaccacgcgctacagcctgacggccgggcggctcaacgatcccagcctggagcgtcggccgaacatgctgcagggcgtctaccagcgcggcctgggcaacgacgtcaccgcatacgcgggcggggccttcaccggcagctacatgtccgggttgatgggcgcggcgctgaacacgccggtgggcggattctccggtgacgtgacgctggcgcgtaccgaggttcccggcgacgaccgccttagcggctccagctaccgtctcgcctacagcaagaacctgccgaacaccggcaccaacttttcgctgctcgcctatcgttactccaccggtggctatctcggcctgcgcgacgcggccttcatgcaggaccgggtagagcgaggcgagccgctggagtcgttctcgcgcttgcgcaaccgtctcgacgccaacatcagccagcaactgggcaacggcggcaacctgtacctgaacggctcctcgcagcgctactggagcggcggcgggcgggcggtcaacttctccgtcggctacagcaaccagtggcgcgacgtcagttactccatttccgcgcaacgcctgcgcagccactacgaaggcttttccagcggtgacaagcgcggcgagaccagcacgctgttcagcctgaacctgtccattccgctgggcggcgcgggacgcgggtcgccgaccctgagcagctacctgactcgcgacagcaacagcggaacccagctcaccagcggggtttccggcatgctgggcaagcgtggcgaggcctcctactcgctgtcggcctcccatgaccgcgacagccggcagacctcgaagagcgccagcctcgactatcgactgccgcaggtcgaactcggctccagcctctcgcagggaccgggctatcggcagttgtcggtcaaggccgcggggggcctggtcgcgcacagcggcgggatcaccgcggcacaaaccttgggcgagacgatcggcctggtccacgcgccaaacgccaggggcgcggctgccggctactcgggaagccggatcgaccgccacggctatgcggtgattcccaacctgctgccctaccagttgaacagcgtcgacctcgaccccaacggcatggccgacgagatcgaactgaggtccagttcgcgcaacgtggcgcccaccgccggagcggtggtgcgcctcgactatccgacgcgggtggcaaggcccttgctggtggatagccggatgcccagcggcgagcccctgccgttcgccgcggaagtgctcgatgcccacagcgggcagtcggtgggcgccgtcggccagggcagccgcctggtgctgcgggtcgagcaggatcgcggctcggttcgggtgcgctggggcaacgagccgcagcagcagtgcctggtcgactatgcgctgggcccgcgcgagacgacgcctcccgtcctgcaactggcatgtcgcccggcgtcggccgccgaccgggagcgcacgctgtgaccggcgtcggcctgggacgatgcggcacggcctgggtcctgctggtggcgctggtggcgctggtggccgatgcctccgcctcgctgtccgtgatcgggacccgtttcatctatccggcgggcgtttccgcgctgacgatccgcgtcggtaacgtcgggacgcgcccggccctggtccaggcctggctcgatcgcggcgacgagacggcggacccgagcgctgtcacggtgccgttcatcctgtcgccgccgctgttgcgcatggacccgcaggagacccaggcgctccagcttcgccataccggcgagccgctgccggacgaccgggaatcgctgttctgggtcaacctgctggaggtgccggggcgggaggacggcagcggcaacctgctgctggtgagctaccgcctgcggatgaagctcctgttccgtccgcagggtctggccggcgatccgcgagccgccgcgcgccaggtcgtctggcgcctgcgtccggcggtacggccggggcagcgggtgctgctggaggcggacaaccgcagtccctatcacgtttccctggtgcgcctagagctgggcgagggcgacctcgccatgtccctcggcagcgtcaccttgccgcctttcgccgttaccccgttgagtctgccggccgtgcccggcgaggcggcgcgggtccatttcgatgcggtgggggatgacggccagatcgagcgcggcgacgcgccggcagagagatacccgtaggagttcggcagggcccggggagttgggctcctgccgtagcacggccttgcgaataggtcgcggggtttcactggaggaaggaagcacatgaacaaatgctatgcactggtctggaacgtatcccagggctgctggaacgtcgtcagcgaaggcagtcgcaggcgcggcaagcccgccggcgccaaggcggcgatcgcctccgtcctggccctgctgggcgccacggccctggctccggcctatgcgctgccaagcgggggaacggtggtcggcgggagcgcgaacggggagatacacctgtcgggcggcaacagcctgtcggtcaaccagaaggtcgacaagctcatcgccaactgggactccttcagcgttgccgccggcgagcgggtgatcttcaaccagccgagcagtagctcgattgccctgaatcgggtgatcggcaccaaggccagcgatatccagggccggatcgatgccaacggccaggtcttcctggtcaaccccaatggcgtgctcttcggtcgcggcgcccaggtcaatgtcggcggcctggtggcttccacgctggacatcacggatgccgagttcaacggcaactcctccagataccgtttcacgggtccctctaccaacggtgtcctcaaccagggaggcgccatcaccgcggcggaaggcggcagcatcgccctgctcggcgcgcaggtcgacaaccgcgggacggtcctggcgcagatgggcggtgtcgggctcggcgcgggcagcgacctgacgctgaatttcgacggcaacaagctgctcgacatccgcgtcgacgccggggtcgccaatgcgctggcaagcaacggcggcctgctcaaggccgacggggggcgagtcctgatggcggccaggaccgccaatgcgctgctcaacacggtggtgaacacccagggtgccatcgaggcccgctcgctgcgcggcagtaacgggcggatcgtgctcgatggcggcccggacggcaaggtcatggtgggaggcgccttgtccgccaatgcgctgaacggaccagggcacggcggcacggtcgaggtccgggggcaggcggtggaagtggccctgggcacccaggtgaacacgctcgccagcaatggcctcaacggcacctggaagattgccgccgacaagatcgacgtgcgcccgtcggcggtgtcggatggcgtcaccgttcatgccgacaccctgtcgcggaacctggcgagcaccaatatcgaactggtttcgaccaagggcgacctggacctcgacggctcggtgagctgggcatcgggcaaccggctggggctgggctccgcggccgacctgacgctgaatggcaggctgaatgccagtggcgccaaggctgggctggagctgaaggccgaaggcgctatcgatatcaatgacaagatcgttctcggcggggctggcagcgcgctggccatggatgccggcgaaggccaccgggtgaacggcacggcgtcggtctccctggccggggccaacgcgacctacgtctccggtggctattactacacggtggtgcagaacctggcgcagttgcaggcgatcaacaagaacctggacggcctgtacgtgctcggcggcaatatcctgggcggcagctattactgcacggcactgcagtccatcggcgggcccgccggcgtcttcagcggcaccctggacggtctcggcaacagcatcggcaatctctcgatcagcaacaccgggccgaatgtcgggctgttcgcccgctcctcgggcaccctgagcaacctgaagctgaacaacctgcgggtatccgataacacctacggctccggaccgtcttcgctcggcgccctggtcgggatcaacagcggccgcatcgccaacgtcagcgccagcggggtctcggtcgtcggcagccgactgcgctccaacgcactgggcggcctggtcgggcgcaatatcagcgggcagatcgcgaacgcatccgtcagcggcggcgtcaccggttatgcggcgagcacggcggtcggcggtctggtgggggagaacttcaccactgcctgggggccggaggcggtcatcgagaacgcccacagcaacgtccatgtggctgcacagtccaccgagcgcaacagcctgggcggcgtcggcggcctggtcggactgaatgcgaagggcatgatcagggcgtccggcagccaggggaaggtcgagacctaccggcccggcctgaacgtcggcggcctggtcggctacaacatgttcggccacgtctccgatagtagcgccagcggccaggtggaggccggcggcgcggggaataccggcgggctggtcggcctgagttccggcggcgagatattccgctcgcaggcgagcgggtcggtgtacagcaagggcggcctggcgaccggcgggctgatcggcaaggcagaaggcaacggcatgctcggaaacctgaaagccagcggcagcgtcacggaccagggcggcgcggatctgggcgggctggtcggcaacaatagccagagcgccatcgagaccgccgaggcgacgggcaaggtcagcggcggcagcaacagtcgcgtcggcgggctgattggacacaacctcggcggttccgtcgcccatgcgatctcgcgcggcgacgtgagcggcgggttcaacagcctggtgggcgggctcgtcggccacaacggcggcgaactggtcaacgtggataccagcggcagggtcagcgccgctgcgagtgcgtcggttggcggcctggtcggcagcaacgccggttcgatcctgtcggcgcgcagcagcagtaccgtcaacagcggcgggcgcagccgcatcggcggcctggtcggcgagaaccagatccagggacgcatcgtttcgtccatgtcggaaggcaccgtcagtggcgactactacgtctccatgggcgggctggccggcgtcaacctgggatcgatcgagtactccggcgtcagcggcaagatcgacttcaagcctcagtcccattacggccagatctacggtgcgcaggtcggcgagaaccatggggtcctgggcggcaactacgtgatcggcgaggcggcgctcctgccgcctgccggtatcgactacggcaacatctggtaaggccggcaggggaggtccctggcggacctcccttcccggccggggccgctctcgcctggagtgtggccctcttccgcaggcgcaatcttggagagttccatgagcatgaggttatttcccggccgcgtttccctgcgccgccggcctggcgcgcaggctcggcaggcgctcgttctcggcctctgctgcctgaccggcggccaggcctgggccctgaacgaggtcgccctgaactgctcgttcggcaatggcaaaggcttgccctggcgtgtggtgaacgagctgaccagcggcacggcgaaaggcacggtgctgttcgccaggccggtgagcctgttcctgaactacaagccccaggcttcccaggaggcgcatgagctggtcatcggggggaactggtccggggtgggctatccggggccctacggcacggtggcgtccgacgtcaaaggcatcggctatcggatctcggtggatgcccaggacggcgtcaagcgggtgattccggtcgacaaccagccccatgcgctggacaagcgagtcacgagcttttccggaagcacgaccagcgactacctacaggaactggtcctgacggtcgaccccggcgagttgcctgccggcgacctgaaggtaaccagcgtatccggcagcgccaccctgaatctctgggcggtggacaggctgaagggcgaagcgtccatcggcagcgtcctggcggtgcctgcggacaactaccccaccggggtttgccgaaagccctattcgctgatcggcccggcctccatcgggatcggcggcggtcccccgccgccgccgatcccgaagaaatgcaaggtcgaggtgggacgggaaatcaacgtcaaactgggtagcgtcgcgttgaagaacttcccgcgggtcaacgacacctccacggagcgttccttcgatatttctctcagcgagtgtgcggcgctggccaagccggaaatcgctttccgcgacaagtatgtctcggcgcagcaagcggacccgacgatcctcagcttgaagagcggcggcgcggcggggttcggcatcgtcgtgaagaacggcctggaccagcagcggatacgtttcgacggcacgccctacccgatgcggcgtgtcggcgacagcgccgacctcccgctgagtgccgcctacatccgtatcggcgcggagggcgaattgaaggccggggtcgccgacggcgccgccgagttcacgtttaccttcccctgagcggcgccgccgttctttccccggcgtttcccgccccgcctcgggaagcgccgtcggccgctttcgcgccagccctcgcgaaggctcggcccctcacctccagtggttgcagatcgccgaaggcgctctgcatatcgctccgctgctcgtcctgggtctcgtgcgcacatgccattcccgcacgcggaatgccgatattgcgtatgggcgaaggctttctgagggatatgcaagtttcctgggtaggatttcgcgcaaataaacgaacgctattttccagtcgatagtttcagcttgtcgcggaactcttttttcaaactttttgctgctctggcttgtccgtttcgtatttcatcgtttttcataaatgtctacgtagacgtttttcgggggctgtttcaagtgtctttgttgttagtttacgaggcgaaaaaatagtagttttactatattaaatatcgtcggtttcactagaaaatacacatgttcactttgaaccggggcagtggcgtcggcggattccgaaccgcgctttcctccttgccggccgagcggcggccgcctgcctgcggcaggcatgaccgagaccacaggtttcctggtaacgctttcgcctgccgtgtaccgcttaaggagacgcaaggatgtccctacatcgcattcgcgtaatggttgcggatgatcatcccgccatttcgctgggtatttcctacgaactgagtcagtgcggttctctggagatgctcggtcaagtttccaattctaccgagttgatcggtcggctcaacgaaggcgactgcgatgtcgttatcgtcgactatacgatgccgggcgggaaatatggcgatggactggcattgttgtcattgctgcggcgacgttatccgcatctgcaattggttgtctttaccatgctgaacaatccgggccttatccgggccattctcaagcagggtatcaattgcatcctcagcaagtccgactcgaccagtcacctgctggcggcggtgagcgcggcctattcgcgaaaccagtatttctcgccgtcgatcagggacatcttcgtcaaccaggtgctttcctcgcacaacgaacggctgacgccccgggaggcggaaatcgtccgtctgttcggctccggactgaccatcaccgaaatcgccgagcgctcgcatcgcagcgtgcagaccatcagtacgcagaaggtcagtgccatgaagaagctcggcatcaagcgcgatgccgacctcatcaggtatgcggccgagggctattgccggatgccctgacggatcggcccgcttcaccagggcagcggctggttccgataatcgacgaagcgacaggcattcacgcccgcggcatcctccaccgccgcgaccagtccggcggcgctttcctcgacgctcagcggcgcgctgtcgccgcccatttcggtacgcacccagccgggatgcaggagcaacaggctgaacggcaactcctcgaactcgccctcccaactgcgtaccaggctgttcagcgccgccttgctggcgccgtagagcggcatcgtggccgacaggcccagcgccaggctggccatctgcgaactcatgaacgccaccacgccaccccggctaacccggccggacagtgccctggccaggcgcagcggcgcgatggcgttggtcaggaatagctgggcggtctgctcggcgtcgatttccgccacatcctgttgctgcgggccgtagatgccggcgttgacgatcaggcgatcgatccgccgctcgcccagcatctcgccaatgcgttcggcgcaatcgtgttggttgaggtcgccggtcaccgcttgcaagcgctccccggcccgctccgccagtgcctgtagcccgggagagccttgcggtcgccgggcgacggcgaatacctgtgcgccgcgttgcaggaaggcatccgccagtcccaggccgatgccgcgcgaggcgccgacgatcagaacgttgtgcatgaggttctccgggcgataaagcggacaggatacccaagcgcgtcccgctgcggtaaccgccgcggcgaccggccgcggcggcctcgaccttaccgcatggcgctgccgcccaggccggcgaggtacaggtcgagcaggcggtcgtcgaactccggctcgcgcacggcgctcccgcgcaggtgttcctcgacgttggtgcagtcccagagataggtgtcctggtacaactcgacggtgctgcggccggcgtacatgttgtcgcggaacatgctcagcaggggatagagcggggcgtcgcgattgtcttcccagagacttacccagtcgtcgaacggcatctgccgaaggggacgcccggcgcgtcgcccgagacggccgaagaactcgtccaggggcaggcagcgcggaatgctcggcaccaggttgaatttcttgcccagcgccgaaggctggcgggcgatgacgctgatcgcctctaccatgtagtccaccgtggtcaggccctcgcgcagctcgcgcaggagcggcacggcccggtactccaggcaggtccgcgccagccggctccaccactggtagtcggcgtaggcgccggtacggctgtggcaggtggcgtagccgaggcggaaggtcatcagcggcaggccgcgttcggcggcgaggtcggcgatcttttccatcacccatttgctgcgcacgtagcccatgtcggtgaccaccgccggcaggttctggtcgatgtcgtcgtcctcgcgcatcaggcgcttgccggtatgcaggtggccccagctgtacaccgagatgctcgacagcagcatcagcggcttgcagcggccgctggcgcagaagcgcaggacctggccgagcccctcgacgttgtcgcgcttcatgtagctgtatggctggatgaagttcaccgcgctggcggaatggaagacctggtcgacgctgccggccagctcgcgataggtttccgccggtagtccgaaacctggttctgcgaggtcggcggcgtaggccctgacccgtcgccagtccgtctcggcgagttcgatgcggtgctgccgggcggcctggcgcaggcgttcgagggcatgggcgtcgttttgcgcacggaccggacaatgcaggtcggcctcgcggctggccagcagctcggcgagcaggtgggcgcccatcagcccgctggcgccggtgagcaggatgtgccgtggcgccagcaattgggcggtgtccatggggcggctgaaatccacgtcggcgggcaggcgcacgtcccgttgcagctcctgggccggttcgctgtccagcgccggcggcgcttcgccggcgcgccgcgccaggctggccgccagttggcgcacgctcggggtgcggtagatgtcgtggatgtaggcacggttgccgaagcgtcggctcaattcgcgcaccagggcggcggccagcagggaatggccgccgacctcgaagaagctgtcgtccaggccgaagtcggtatgccccagcacttcctgccaggacagggccacttgcagttcgccgggggtgccgaagcgttgctcgtcgagtcgttcctggcattgttcgtccaggtgtcgacgcagggcctggcggtcgatcttgccgttgaccgtggtcggcaggctgtccagcgacaggtagcggctgggcagcatgtagtcgggcagttcctggcgcagtgcggtcttgatggcggcgagcacggccctggcatcgccgtcctgctggcgggggaccacgaaggcgctcaattgctggctaccggagcgtgggtcggcatgcgccagcaccaccgcgccgtggatagccggctggcgcaacagcgcggcctcgacgtcgccgagttcgacgcggtggccgcggatcttcatctggtcgtccagccgaccgaggaactgcaggctgccatcggccaaccagcgggccttgtcgccggtgcggtagagccgacgccgcagtgcctgcgagtagtggaagcgcctggcggtcatgtccgggtcgcgcaggtattcgcgcgccaggcagacgcccgccaggttcagttcaccgggtcggtcgccatggcaaggccggtcgtcggcgtcgaggatgaatgcctcgcagccgtcgatgggcgtgccgatcgaggcgggtcgccgatgtgcttcggcgtcgacgatgcggcaggtggcgaagaccgtggcctcggtcgggccgtagtagtccaccacggtatagggcagcccgccggttgcgaccggcggcagtttttccccggcgcagaacaggtagcgcagcgccagcgacggcggggcgggctgctccgccagcgcgggcaccatcacggtaggcgcgaaggcgtggctgatccgctgctcggcgaagaatgccagcagcgccgccgggtctgggcgcacctcgtcgggtaccaggtggaggcaggcgcctgcgcacagggtggaccagatttcccattgggaaacgtcgaagccgacgccggccatcagggtggtgcggctccgttgatccatattgaagcgccggttgtgccagctcacgaggttggccagggagcgactctcgatcaccacgcccttgggttcgccggtggtgcccgaggtgaagatcacatacagcgcttcgctgccgtcgagcgccggtctcggcgcggcacccgccgcactcgtcgcgagcgcctgtgcgatggcctccaccggttgccccggcaggtcctcggcctgggtggcgagggccaagggggcctggcactggcggaggatttcccgcttgcgcctgtcgggttgccgacggtccaccggtacgtaggccgctgcgcacttggcggccgccaggatggcgatgaccagttcggccgagcgttcggccagcaggggcagcagctcgccccgggcgacgccgcgcctggccaggtgggcggccagccggtcgctgagccggtcgagttcgcggtagctgaacgagcgctcgcgatcgacgagggcggggcgttcgggatgggtatctgcgtgttgcctgaataagccaagaacagaatctttcgacatggctgagactcctgtcttgccggtggaaaagacgttatccgtggtttttcagcgtatcgagcggggaccagggggaaggctggcgataggcctggtccaaggctagccccgaggggaaatgcggcaactgccatttggtacagggtaaggggggcttgccgccggggtcgccaggggcgccccggacgttttcggaagcgggaccggactcagtccaactggccttcccggtcgtcgaagatcgcttctatggccagtccgaacacccgggcgagcttgaacgccaagggcaggcttggatcgtagcggccggtttcgatggcgttcaccgtctgccgcgatacctccagctttccggccagctccgcctgtgaccaaccgcgctccgcgcgcaactcgcgaacgcggttcctcatgcgtagcgcctcagtcccaggacgcagccgatgacccagaacgcgcccatcaggggccagacgaagaacatcgagagtttcggaaagccggtggtttcgaggaaaccgtaggtgaaggtgagcagggcggtgccgacgaaggccagggcgagggcttcgagatggatgcgccgggccatttcgtcgaggcgccgcaggtaacggatcaccaccagcgccagggcgaccatcggtggcaccggcagcagggcgaggaagacccggccggcgcccggttccgtgcctgccagcaactggccgctgatcagaacggcagcggcatagccgaccagcgcgagaagcagttcgaggaagaaacgtttgtgggtcatggttgaaccgtccatgtaaagggggctttacattggccgggatgctcttctttgtcaagcaagctttacattctctatgggcttgccttggcgaggagactcggggatggtagcgggcggtctctgggagaacggcgaaatggcgacgggcgacgaattcgacgcgctgctggtggaagccggccgcacaccgatgcgcggctgggaatacgactatggcggacgcatccgcctggaaccgccgccatgggatttcccggggcgcatgctggagcgctgccgggccgccgccagcctgctggacatgggcaccggcggcggcgaatggttgagccggctgccgtatcgtccgccgctcaccgtggctaccgagggctgggcgcccaacctggagattgcccggggtcgcctggagcccctgggcatccgcgtggtcgaggtggagggcgcgccggacaaccatcgccagggccgggagggcgatggcggcggggcgttgccgttcgccgatggcaccttcgacctggtcggcaaccgccacgagtcctatctgccatcggaggtccggcgggtgctggcgcccggcggctgtttcctcacccagcaggtggccggcgacttcaaccgcgagttctatgcgttgctcggcgaaccggcgccgccgccggaggcaccgcactggaatctgggtttcgcccgcgcccagctggaggccgcggagttgccgccggtggcaggcggcgaaggttgggaggtgttgcacttcgccgatgtcggcgccctggcctggtacctgttgaatctgccctgggtatttcccggtttttccttcaggcgccaccgcaagggcctgcgcggcctgcacgagagcggcgagccgctggcggtgcggcagttcctcttctggctggaggcgcgcaacccccaggccgcgcgcggctagaggaagagtcgcttcaccagctcggtgcggctgcgcgcaccggtcttgcggaacaggttgagcaggtgggtcttcaccgtcggcaggccgagtccgaggcactgcgccaggcatttgttgctgacgccgtcacgcagcagcagggcgatctcccgttccctcggcgtcaggccttgcaggcgctcggcgctggccgctggcgtggcgcatgcctgcgccgccagctccatcaggccatgcagggcgcgcaactgtcgcagctcctggtcggagaaggcccctaggcgggcgtcgcgcagtaacgacagggccgccaccggacgctgctgcgcatgcgccagtacctcgaccacgtcgcagatcccgtggcgtcgcaggaagccctggtacagcgcgctgtccttcgcgggctggcgggcgatgccctggcgcagcggcactaccggcgaagcgctggccaggcagtggcgcggttgcagcggatcgtagtcgcggtagtggcgcaggtagtcgcggtgcatgccggccggcatccgcaggagctggaagtcgtgtgcgcgacagtcctcgtcgatgcgatagaacacgcacaggctggccggcaccacctgggtgaaggcctgcatgcagcgcaggccgaggtcgggcgacagggtcgaagacatggcgcggggctcccgtgggacgaggcggcgggacgtccactgtcccgcctgccgggcagaatgtccatgccccggcgtgccgtcttgtctttctctgcctggcttggcaggcagcggcaagaaacccggcaggctggagcaagcgagcgggggagcggcgggtccagagtattcccgggtagtaggcgcatgcacgacgcagcgccgtcgccaagccgaggagcacacatgagtattgccatcgacccgtccgtcagcgccttcttgcgcagtccccatggcctgctgatcgacggtgagtccgggccggcgcgttccggcgccgacatgccgctgtacgacccggcgaccggcgccgagctggctcgcgtggcccgcgccggcgccgaagacgtcgaccgggcagtcgctgccgcgcggcgcgcgttcgaaggcaactgggcaggccagcgcccggccgatcgcgagcgcctgctgctgcgactggcggaacgggtcgaggcgcatggcgagcaactggcgcagttggaaaccctgaacaacggcaagtcgatcaacctgtcgcgggccctggaggtcggcgcctcggtggagttcatccgctacatggccggctgggcgaccaagatcgagggtcgcagcctcgacctgtcgatcgccgcggtcccaggcgcgcgctaccgggcctacacggtgccggagccggtgggcgtggtcggagccatcgtgccgtggaatttccccttgctgatggcgatctggaagatcgtcccggccctggcctgcggctgcaccgtggtcctcaagccggccgacgaaaccccgctgaccgccctgcgcctcggccagttgtgcctggaggcggggattccgccaggagtggtgaacatcgtcaccggcacgggcgccgaggccggcgcggcactggcggcgcacccgggcatcgacaagctggcgttcaccggctcgaccccggtgggcaagctgatcgggcatgcggcggtggagaacatgacgcgtttttccctcgaactcggcggcaaatccccggtgatcatcctcgatgacaccagcctggacatggctgccgccggttccgccggcgcgatcttcttcaaccaggggcaggtctgcaccgctggctcgcgcctctatgtgcagcgcaagcgtttcgaccaggtgctggagcgcctggtggccatcgccggcgacctgagcatcggccccggcctggatccgaccacgcagatcaacccgctggtctcggccaggcagcaggagcgggtgctggggatgatcgaaagcggggtggccgagggcgccagcgtggtctgcggtggggcgcgccagggcgagacggggttctacgtgcagccgacgatccttgccgacgtcaccccggggatgcaggtggtgcgcgaggaaatcttcgggccggtgctggtggcgacgcccttcgacgatctcgacgaagcggtgcgcctggccaacgacagcatctacgggctcggtgcgagcatctggtccaacgacctgcgccaggtcatggacctggtacccaggatcaaggccggcacggtatgggtgaacgcccacaacctgctcgacccgtcgatgccgttcggcggcttcaagcagtccggcatcggacgcgagatgggccatgcggcgatcgaggcgtacaccgagaacaagtcggtgtgcatcgcctactgatatcgatgaatcggggggagccgattcgttcggctctttcgctgccctccgcggcagccttttgttcgacacgcctcgcctgccggcggagcgtacgggacgccggcgcgtcccgcagggcctgacgcaagaacaacaacagcaacgctgccgtcgaggatacgtcgatgtccaactccagactcacccagcacctgctccgcgggcgggttggtttccccaccgccctggccagttcggtcgggttgatcatggccagcccggtgatcctcaccgccaccaccggcttcggcctgggcggaggaaccttcgccgtggcgatgctggtggcgctgctgctgatgctggcgcagtccaccaccttcgccgaggccgcctgcctgctgccgacccgtggctcggtctacgactacctgtcgtgcggcctcgggcgcttcttcgcgatcaccggcacgctgtcggcctacctgatcgtccatgtgttcgccggcaccgccgagaccatgctcagcggcaccatggcgctggtcaacttcgagtcgctgaataccctcaccgagccgggcggcggcgcctggctggtgggcgtcggcatggtgctctgcttcggcctgctgaatgcgctggggatcaccgccttcggtcgcgccgaagtgatcctcaccttcggcatgtggagcaccctgatgatcttcgccgtggccggcctgttgcgcctgcccgcggtggagttgcagggctggttcggggcctcgatggtcggcgacgacctgccgaccctgctttcgctggtgggcatggcgatgttcatgttcgtcggttgcgaattcgtcacgccgctggcgccggaggtgcgccacgcttcgcggaccctgccgcgggcgatggccctggggttgatcggggtggcctgctgcatgttcctctatggcgcggcgatgcgccggcaggtggaaaatctcgacctcggcggcggcctgcacctgctggagacgccgatggcgatcccgcgattcgccgagcaggtgatgggaccgttcggacgcatctggctgggcgtgggcctgctgttcgccggggccgccaccatcaacaccctgatggccggcctgccgcggattctctacgggatggcgctggatggcgccttgccgaaggccttcacctacctgcacccgcgcttcaagacaccgttgctgtgcatcgccgtggcagcggcgattccctgtctgcacgcctggtggctgggcggcgacagcgaagggatcatccacctggtcctggctgcggtctgcgcctggggcaccgcctacctgctggtgaccctctccgtggtgctgctgcgcatccgtcgcccggacctgccgcgcgcctaccgctcgccgctgttcccgttgccgcagctattctccagcgccggaatcctgctggggatgttctacatcacgccgccggggatgaaccccgccgacatctacctgccgttcgccctgatgctcggcctggcggccgcctacgccctgttctggaccctgtgcgtacagcgggtgagtccgttccgtccgctggcggtggaagaggtgctggagaaggaattcgccgaagaggaccagcagcagcgggagagggcgcatgtccgcctgggcgcgctggtatgagcgtcactggcgcgactggcggccagccgcctatcgccccggagccaccctggccctggtgcggcgcaacctggctgcgtgcgacggcgaggcgcaggacggcaggctgttgctgcgtacgaaagagctgagcctcgaggttcgcgagcgggtccaggcgcacctgttcatgcatatcgtcagcaccgagttcagcctgttcgtggcggcgcccggggggccgccggccagcctggagctgcgtcacgccggttgcttgcggcgtcgcggcatcctttgcaaggtacgcagcgggagcgggctcgagccgttgcgggaggccttgcaggggggcgaccgggtcttgctggagcagctcatgccgctggacttccggagtttgcgcctctgccgcgacgacaggggctggaccgtgagcctggaacacctgggggcgtgcgaggtggtcaaccgcttccccgcctatcgccgctacatccctctggtcgccgagcagcgcctggccctgctgggcgccttcgcccaattgcagcgcttgctttctcccgcctgaacggcccttgccggctctcccggatgcgtatccgccggtccatttgcgctagcttgtgggtatatcgataacatgttaatcatatcggcagcgctgcgtggctcggtaattgccgcgccatacaacaataacgatggccgttgccgtcaggaggtgcccggtgcataccctgtcttccgcacacaacagcttcgaagcctggaaccaggcgttgcgccaggtctgcgggcgcttcgaatcgcagcccgcgctgaaccggacgctgttcatcggcgatatctcgcggcaggaccttggcggtctggagctggcgcagatccgcaccaacgcagggcgcatcgcccgccaggccacccatgccgatcatgacgacgaccgccactgcttcctggtcgtccagcgcagcggccatgcgcaactgcgccagggtggggacagcatagagctggcgccaggggaaatggcgctgatggactccgcgggcggctgcgagatcattccccacggactcatcgaacacacctcgttccatctctcccgcgaagaggtatgccggcacctgccacccagccagcgggccttcggcaaactctcgccgaactgcgccagcggtcgcctgctgagcctgctggtgcagcaggtgtgcgccggagaactgcagccgtgggcggtggcggacgagggcggggcgttgcaggaggcgctgatcgccctgctcgggccggcgctacagcacgccggcgaggaattggagggaccgctggccgggctctatggctacagtctgcgccggcacgcggagcgtctgatcgagcaatccctgcaggagccgcgcctgagtccggacatgctcgccggccgcctgcgcatctcggtgcgccagttgtaccggttgttcgaggagcagggcgacagcgtctgccgctacattctccgccagcgcctcagccgcagcgccgccgacctcggcaacccacggctgcgcggcgaatcgatcacctccatcgccttcaagtggggtttcagcgactcggcgcatttcagccgggcgttcaagaagcagttcgaggtttcgcccaaggactatcgggccggcgcgctaccggcctgacgccgccgcgcgctgccattcgtcccgccgatccgcgccgcaggcggagctggcccggtgaatgcttgacgcttcaccggaggcacagcaagaatgcggcgtgtcaggttgcatgaaaataacggcggcgctgtccggggtacctgccgcgacaagcagcacccgatgcccgcacctttcatgtcgccagcgaggcgcaggatgtcattgccttggggcgtgcgccgcgtcgctattcactatcagatttcgagtgcccccctacaccatgcgaatgcgcctgatgcttttgggcggcggtaatgcccttggacaggcgctgatccgcctaggggcggaggaagacatcggtttcctcgcgcccagaccaccggagcagggctgggatgccgccagcctcaccaccctgctggacgaaacgcgccccgacgcggtgatcaacctcgccttctaccacgactggttccaggccgagcaggtcgaggcggagcgcctgggcgcccaggagcgcgccgtcgagcgcctcgcggagctctgccagcactacgagatcctgctggtccagccgtccagctaccgggtcttcgacggcgcccgcgccaccgcctacagcgagaaggacgagacccttccgctgggcctgcgtggccaggcgctctggcgcatggagcagagcgtgcgcgcggcctgcccgcgacatgtgctgatccgcttcggctggctgctggacgaaagcccgaacggcttgctgggacgtttcctcagccgcgccgaacaaccgcagccgctgttcctcgccgacgaccggcgcggcaacccgacgccggtggacgacgccgcgcgggtggtgctctcggtgctcaagcagctcgactgccaggcgccgctgtggggcacctaccactacggcggactggaagcgaccaccaccctggcgctgggacaggtgatcctcaacgaggcgcgtacctatcgctccaacctgatccaggagccttcggcggaggcccatgccgcgcgcccggacgcgctcgacgagccgcagcacgcggtgatggtctgcaagaagatcctccacaccttcggcatcaagccgcgcgcctggcgcgcaggtttgccggctctattggacaggtactacaggcatgtttgaacgccccatcctgatcactggcggcgccggtttcatcggctcccacctgaccgacgcgctgctggcgcgcggctaccgcgtgcgtgtgctggacaacctgtccaccggcaagcgcgacaacctgcccctggacgacgaacgggtagagctgctcgaaggcgacgccgccgacgcggcgaccctggcggccgccctgaagggctgcgcggcggtcgcccacctggccgcggtcgcctcggtacaggcctcggtggacgacccggtcgccacccaccagagcaatttcatcgccaccctgaacctctgcgaagcgatgcgcgagcagggcgtgaagcgcgtggtgttcgcttccagcgcagcggtctacgggcagaacggcgaaggcacggcgatcgacgaagacaccccgaagtcaccgctgacgccctacgcgtcggacaagctggccagcgagtactacctcgatttctatcgccgccagcatgggctggaaccggcgatcttccgcttcttcaacgtctacgggccacgccaggacccgtcctcgccctattccggggtgatcagcatattcaccgagcgcgccctgaaggggacgccgatcaccgtgttcggcgacggcgagcagacccgcgacttcatctacgtcgccgacctggtcgatttcctggtccaggcgctggaggcgacggcgctggaacccggggcggtgaacgtcggcctgaatcgcagcatcagcctgaagcagttgctggcagagatcggccaggtgctcggtggcctgccgccggtgacccacgccgacgcgcgagccggtgacatcaggcattcgcgggcgaacaacgagcgcctgctgcggcgtttccgcttcgaccagccgacgccgatgggcgtgggcctggcgcgcctgctcggccgctgatcaccaccagggcttgttcagcgccaggtagaagatcccgcccagcagggtgaggctgaggacgctgagcaggcccttgccggggccccgcgccatccgcagggcgaacgccgcgcagacgatgtagcccagcaacagccccagcttcgccagcagccagagcggcagcggccagggcatcgccaggtgcaccaggccgagcgcgctgagcagcagcagggtgtccaccaggtgcggtccccagcggcggatgccgctggccttgcgccccgaccagttccaggccaggcgccagacgaacagggcggcgctgctgagggcgaaggtgatgtgcagggtcttcagccagaggtacatggggtccgtttccacaggatgaaaaaaggcgcccaaaggcgccttttcccgttggggcgcaagccccgcgacagtctacgactcagaacttgtagccgaaaccgatcatgtagacccacggatcgacgtccacgtcgaccttggtcttgttcacgcccagggcgctcgggccgttgatgctggccttggtgtcgatgtccatgtaccagacggccatgttgaacagcgcgtgctcgttgagcatgtagtcgaagcccagttcgccggccaggccccaggagtcctgcagcttcatgctgctgaaaccctgcgccttgcggttgctggccaggtcttcgtcgaagaaggtggtgtagttcacgcccaggccgccgtagggctggaaggcgctgttggtaccgcccatggggtaatactggagcagcagggtcggcggcagttgcttgatgtcggccagcttgccgtccaggcccgggccgaggcccttgacgtcgacctggtggttgaacggagtggcggcgaccagttccacgccccacttgtcggcgaacatgtaggtgaaggtcaggccgagctgggtgtcgctgtcgacagtcgccttggtaccgcgctgcttggcgccgtccagcttgatgtcggaactgctgtcgtcgggatcgacggtggcgaagccgccacggatgatgaagtcaccggccttgtgtccttgaatatccgcagcggcgaacggggaggcgacggtgagggccagcagggaagcggtaagccaggacttacgcatgatgagctccattccttgtattagaaagtgttggtgctgctaatggtcagccagctaacagttgccttccttgacacagctcaatcaatcctaggagcaaatgtgaccgccgcaacgtaaatggcgcggcggattgtcgcatgtcgttcagccaccttcgtattcgtagggcgtcaccttgctcgcctgcatgcggtagccggccgccgccagctcgctgctggcgttctccaccttgaaggtgccctcgacccagaatggctgatacaactcgtccatctgcacgcccttggcggtcttcacgtagacgatctggttcgacggcggcggcggtacgtggatgcaggcgccgtagtaggggaccaggaggaactcggtgaccagcccggcctcgctgatttccagcggcacgatgtagcccggcagcttggcctcgatgccgtccagtgccttcaccaccggggcgttggggctctgctggctggccgccggaccggcttcgctgagggcgttggcgaggtcgtggatcggcagcggcgccggggcgggcggggcgccggccgggatcagttgcgaccaggtcagttcgcgcggcgcggcgcgcgccacggcactgcccaggagcagggcgaaagccagcaggaggacggtcagggagcgcagcatcggggaatatctccgggtcataggcggatcgacaggccatcggccagggactggcggtaggcgcgccaggccggcacgcagccgatcagcacggcggccgccaggatagccccgagcaggctccactcatagtcgctcggccaggccagcggcaggtagatgccgtagttggcctggacgtagccctggctggcggcgatgccgaggtagagcaggccgaggccgagggcgacgccggccagcgccaggctgaaggcctcggccagcagcaggccgaagatgtgccaggggcgcgcgcccaccgagcgcaggatggccatctcccggcggcgctcgttgaggctggtgaggatcgccgtgagcatgccgatcaggccggtgaggacgacgaacagcgagaccacgaacagtgccttctcggcggtgcccatcaggccccacagttcctgcagggcgacaccggggaggatcgccatcagcggttcgccgggatagtcgttgacctcgcgttgcagggcgaaggtcgccaccttgctcttcaggccgaccaggaacgcggtgatcgcctgtggttgcaggtccatgtgccgcgcctgctcggcactgacgcgcccggcgcccatcgccggcaccccgttgcgccagtcgacgtgcagcgcctccatgccggcgagggatatgtgcagggtgcggtccaccggggtaccggtgcgctggaggatgccgaccacggtgaacggcttgtcgtcgtgcttgaccaggctcaccgtgctcaccccatgggccagcacgatcttctcgccgagcctgtagtgcagggcttcggccacctcggcgccgagcaccacgtcgaacaggtcctggccgaaggcgcggccctcggccagttgcagttcctggccgcggccgtagcggtagtgctcgaaatagccggcatcggtacccattacccggtagccgcggtgcgagtcgccgagggagatcggaatcgcccacttcacccgcgggttttcggcgaagtgccggtagctgtcccagcggatgttgttggtcgcgttgccgatgcggaataccgagtagagcagcaggttcaccgagccggagcgcgcgccgacgatcaggtcggttccggagatggtactggcgaagctggccttggcctcggtgcggacccgctccaccgccagcagcaggcaggcggagagggcgatggcgaagatcgtcagcagggcggtgaagcggcggttggccaggctggccagtgccagtcggaagagatacatgctcagagtcctgccggccgggcggcgcggttgagatcggaaagggacaggctgcggtcgaacagcccggccaggctctggtcgtggctgacgaacagcaggctggcgccggcctcgcggcattcggcgaagagcaactggagaaacgcctcgcggctgtcggcgtcgagcgccgaggtcggctcgtcggcgatcaccagctccggctggccgatcagcgcgcgggcggcggcgacccgctgctgctggccgatggacaggctgtcggcgcggcgttcgtgcagttcgccgccgaggccgagctggccgagcagatggctggcggcctgcgccgggctaccgtggcgttcgcgggcgcgctgacggcgcaacgcggaaaagtgacagggcagctcgacgttctcgcgtaccgagaggaatggcagcaggttgaactgctggaagatgtagccggtgtggtcgacgcggaaatggtcgcggcgcgcggcggacagcttttccaggtcctcgccgagcaggcggatgctgccgcggccgggcttctgcacgccgccgaggaggccgagcagggtggtcttgccgctgccggaaggccccttgaggaacaggctctcgccgcgttcgagatggaagctgggaatgtccagcaactccgcctggccgggccaggcgaagccgaggttggtcagggtgatcagtgcgctcatgggggtaggggcggaacgctccgccggagcctcgagaatggatggaggggcgccgcgccgaatccctcgcggcgcctccggaacgatcctacagcttcagctcggcgctggccggagccaggtcggcgcctttctggccgtcgggaccgatcagttgtacctgaattttctgggtggcggggaagcgcttgaagaactcggcgagggtcagcagcttgagcagctcgggcttctcgcaactgagctggtaatgggcgtggatattggcatgaccgtgttcgtgttcgtgttcgtggcctgccttctccttgtgcgcgtgggccggcgccttgtcgccgaacagcggactccgcagttcctggctggccaccgagcagccggcggtgaccggcagggcgaacagctccagcggtttttccagctgcgcgcgggccttggccacggcggccttgtccgcgtcggtgctggcggcgtgttcgaaaccgaccaggttcatcgccgggctgtccagctccagttcgagggtcttgccgtccagcgccacgttcaactgggcgacgccgtgctcgtgcttgcccaggctgccatgggcgtggtcatggtcgtggtcgtcatgggcctgggcggcgaacggcagcaagacgagggctaacagcagtgggcgcatgaacgggactccggcaaggaaggaaaagagtttgttacgttataacgaatttttccgcctgcctagcctggccgatttggcccctacgcgccgacgtgggagcatggcgcgattcgcttgtggagaaacgagatggtgcggattcgcggaagcatcggcgactggccggtggacctgaccctggaactggacgccgaggattggcgccagctggcgcaacacgtgcccccgccgccgctgggcgagccgcaggtcgcggcggccagggcgccggcgccggcagcgccggtggatcgcctatggcagaccgcccaggacctgctgcgcggcagcgggcggatcgaggggccgcagttgctggcggagttggaggggttcagcggcaatgccggcgccgccaagcaactgctggtgcgcctgcggcacgacgcccgggtcaaggtcgaggtggtcgacggcacccaggtgttcgtctggctggaggactgagccccgcggacggggctcggcgactcagtagagcgcctggtacagcttgcggcggtaggcggtgaccagcgggtggtcgttgccaagcaggtcgaagacctgcaccagggtcttgcgcggcaggtcgtcctggtagccgcggttgcgcaggaacagcttgagcagtccgtccagggccgcctcgtactgctgccgggcgagctgctggacggccaactggtaggctgcctcgtcgtcgccggcatcggccgccaggcggctcttcagctctgcgctgtcgggcaggtcggcagcctggcgcaggaaggtcagctgcgcgcgggcgccggccagggcctgcttgtgctcgtcgctcttcaccgcgtcgaggatggcctgcgcctcttccagttcgccgcgctcggccaggcagcgggcgtagaggatcagcgccgcggcgttctcgttgttctccgccagcagggctttcagggtcgcttcggcgtcgccgatgcggccttcggcgaacagcgcctgggccacttccagcgggtcttcgtcgggcagcgccggtgctttcacatggggttcgagcagggcgcggatctgcgattcgggctgggcgccggcgaaaccgtcgaccggctggccatccttgaacaggaccacggtcggcaggctgcggatgccgaagcgcatcacgatgtcctgctcgacgtcgcagttgaccttggccagcagcaattcgccctggtaggactcggcgatctgcgccagcagtggcatcagcgccttgcacggggcgcaccagtcggcccagaagtccaccaggaccggcttgtggaacgagttctcgatgaccagctgctcgaagttggcgccggtgacgtcgaagatgtagggcgtatcgctcatgtcgattctcggaaacgcaaggtggtgaccactataagtgggggcgcgccgcgcgcaaacaagcccgtgcctcaggcttgcccgcgttcggcgtgatacaggctgaccaggcggaattcggcgggctcggcgaggtccggccaggtacaggcttcgagcacgtccaggcgtcggtacagcggatgacggaagtcacggacccgcgagtcggcgaccagcgcctggcggccgcggctgaggaactggtcgagcagcggcaggttggcgcggtcgtagagcacgtcggccaccaggatcaggtcgaagcgatcgtcctcggcgaagaagtccgccgaatagctcagctccactccgttcagttcggcgttcgcccggctcgctgccagcgccaggggatccaggtcgcaagccaccacctcggcggcgccggcgcgggccgcggcgatcgccgccaccccggagccgctgccgaagtccagcacgcgcttgtcgcggacccactgcgggcgcgccgccagccagcgcgccaggaccagcccgctggcccagcagaagcaccagtacggcggctcttcgaggatgcggcgggtttcctccgggctgaactggcggtccatgttctgcgcgtcgatcagccacaggcgcaggtcggtgccgggcagcgcggtggcgctgagccgggcgtcgccgagcagctcgcccagcgcctgggtcagggcttgcggtgccgtcacggcgcgcgtaccaggcgcagttcgccgagggactgggtggtcggctgggcgatccgcaacggatgcaggcgccaggccaactggccggactggatcacccgcgcgtgcagttcgacgcgcagcgcgccaccggccggcgggaaggattcggggttgaacggcaggcggaagggcatgagttcgccggtggccagcaccgtctcgctggccagcagccgctgtggacggtcgcgctcgtcgatcaccagcagtgccatctgcacctcgctgccgcgtggcaggctgccctggatgctgctcagcgttccgctcagctcgcgcaggtgggccggtagcaccggctcgaccatggtcacgctgcgcgaagcttgcggcgttggcgcaggcttcggcttgtcgctggaacaagcggcgaggagaaggacggccagcagggcgatcgggcgcagggtcatgggctgctccatagcggtggaatccgggcggcgcttgtatagcgcaaagtgtgattcttgtcgcgcttcgcgtaggccgcaacgtccgattcctctcgcctttcccagcgtgccggcgccggtcgattctgcgggtgctcggtcgggcgcggatgcgctaccatgcggcttccttcagctacgcctgtatcagcaccatgcattgtcccttctgcggtgcccatgacaccaaagtgattgactcgcgactggtcgccgagggcgatcaggtgcgccggcgccgcgagtgcctggcctgcggcgaacgcttcaccaccttcgagaccgccgagctggtcatgccgcgcctgatcaagcaggacggcagccgccagccgttcgacgaggacaagctgcgcgccggcatgcagcgcgccctggagaagcgtccggtcagcgtcgagcgcctggaagcggccatcggccacatcaagcaccagttgcgcgccaccggcgagcgcgagatcaagtcgcgggtgctgggcgaactggtgatggccgagctgcagaagctcgacgaagtcgcctacatccgtttcgcctcggtctaccggcgcttccaggacctcaacgaattccgcgaggagatcgaacgcctcgcccgcgagccggccaaggaatgaacgccgccgacccgctgtacatggcccgcgccctggaactggcgcgccaggggctgtactccacccatccgaatccgcgcgtcggctgcgtgctggtcaaggacggccaggtggtcggcgagggctggcacgtccgcgccggcgagccgcacgccgaggtccatgccctgcgccaggccggcgagaatgcacgcggcgccaccgcctacgtgaccctcgagccctgcagccacttcggccgcaccccgccgtgcgccgatgcgctggtgggcgccggggtggcgcgggtggtcgcggcgatgcaggatcccaaccccgaggtcgccggtcgcggcctgctgcgtctgatgcaggccggcatcgcggtgcagagcggcgtcctcgaggccgaggcgcgggaactcaacatcggtttcatcaagcgcatggaacatggcctgccgttcgtccgggtcaagctggcgatgagcctggacgggcgcaccgccatggccagcggggaaagccagtggatcaccgggccctccgcgcgttcggcggtgcagcgcttgcgcgctcgctccagcgtggtgttgtccggcgccgatacgctgctggcggacgatgcgcggctcaacgtacgccccgacgaactgggcctgaacgccgagcttaccgcgctcgccgcggctcgccagccgttgcgggtgctggtcgacgggcgcctgcgggtgccgctggagtcggcgttctaccaggccggtccggcgctggtggcgacctgcgccgccgcctcggcgcgcgaacgcttccaggacgccggccacgaactgctggcgctgccctccgccgagggccacgtcgatttgcacaagctgctcctggaactggcggcgcgcggcgccaacgaagtgctggtggaggccggcccgcgtctggccggcgccttcgcccggctggggctggtggatgagtaccggctgttcgtcgcgccgaagttcctcggctccagcgcccgtcctttgctcgactggccgctggcgcggatggccgatgcggcgcagttgcggatcgacgacatccgcgcggtgggcgacgactggctggtcaccgcgcggccccatccgcgggacgcctgaacttcgctgcgcggcgacgcggcggacgatgcacaagcggcgcaactgtggtaaaacgccacacggccatctcggtggccgtaacgttctcagggcggggtgaaagtccccaccggcggtaatggcgcgcaaggcgcctagcccgcgagcgcttgccggaccggccaccgccggacgacaaggtcagcagacccggtgcgattccggggccgacggtcatagtccggataaagagagaacgggattgcctgcctgggcgtaccctgtgcgcccgcaagatccccttcgatccaaaaagccctgtttttcacgaaacaggagttcgtcatatgtcttcatcttggaatacccgcgctatggcacgcaggccgctcggcgtcgcgccggccatgctgcgcgcctgtgcggcggaaaaacgggaggtcgcatgttcaccggcataatcgagtcgatcggcagcgtccgcgcaatgacgcccaagggcggcgacctgcgggtctacatcgccaccggcaagctcgacctgggcgacgtcaagctcggcgacagcatcgcggtcaacggcgtctgcctgaccgcggtggaactgcccggcgatggcttctgggccgacgtcagccgcgagagcctggcgcgcaccgccttccagcacctgaaggtgggcagccgggtgaacctggaaaaggccctgacgccgaccacccgcctcggcggacacctggtgagcggccacgtcgacggcgtcggcgaggtgctcaagcgcgaggagaacgcccgcgccatccagttcaccgtgcgggccccgcgcgaactggccaggtacatcgcgcacaagggctcgatcaccgtcgacggcaccagcctcacggtgaacgcggtgaacggcgcggagttcgagctgaccatcgtcccgcatacgctcagcgaaaccatcatggccgagtaccagcccggacgccgggtcaacctcgaggtcgacctgctggcccgttacctggagcgcctgctgcttggcgacaaggccgccgagcccagcgcctccggcatcagcgaagcgtttctcgccgagaacggttttctcaagtaacccacgaattgcataagggggtgcccatggcactcaacacgatcgacgaactgatcgaagacatccgccaaggcaagatggtcatcctgatggatgacgaggaccgcgagaacgaaggcgacctgatcatggccgccgaatgcgtccgcaccgaagacatcaacttcatggtcaagcatgcccgcggcctggtctgcatgccgatgacccgcgagcgttgcgagcgcctcggcctgccgctgatggtgcagcgcaacggctccggcttcggcaccaagttcactgtctccatcgaggccgccgagggcgtcaccaccggcatctccgccgcggaccgcgcccgcaccgtgcaggctgcggcggcgaagaacgccgtggccgccgacatcgtcagccccggccacatcttcccgctgatggcccagccgggcggtaccctggctcgcgccgggcacaccgaggcggcctgcgacctggcgcggatggccgggttcgagccgtccggggtgatctgcgaggtgatgaacgacgacggcagcatggctcgccggcccgaactggaggcgttcgccgccgagcacgggatcaagatcggcaccatcgccgacctgatccactaccggctgatccacgagcgcaccgtcgagcgcatcgccgagcagccgctcgacagcgaactgggccacttcaacctgatcacctaccgcgactcggtggagggcgacgtgcacctggcgctgaccctcggcaaggtctgcgcggaagagccgaccctggtccgcgtgcataacatggacccgctgcgcgacctgctgcaggtcaaccagccgggccgctggagcctgcgcgcggcgatgaccagggtcgccgaggcgggcagcggcgtggtgctgctgctcggtcaccagatcggcggcgacgacctgctcgcccatgtccgcgagatcgcttcggcgccggctccggcgcccaaggccaccaccacctacagcaccgtcggtgccggttcgcagatcctgcgcgacctcggcgtgcgcaagatgcgcctgctgagtgcgccgatgcgcttcaatgcgatatccggtttcgacctggaagttgtagaatacctgcccgccgaataaggcctgtcccgcccgccgcgtgcaagatcgcggtgggcgctatgctggacggacctttcgacccttttcgctcggggcgcaacggcgtcccggctctttaacagatgagacctgctcatgaccctgaagaccatcgaaggtaccttcattgcccccaaaggccgctacgccctggtggtcggccgcttcaacagcttcgtcgtggaaagcctggtcagcggcgccgtcgacgccctggtccgccacggcgtggctgaaagcgagatcaccatcatccgcgccccgggtgccttcgagatcccgctggtgacccagaaggtcgcccagcaaggcggcttcgacgccatcatcgccctcggcgcggtgatccgtggcggcaccccgcacttcgaatacgtggctggcgagtgcaccaagggcctggcccaggtgtccctgcagttcggcatcccggtcgccttcggcgtcctcaccgtcgactccatcgagcaggccatcgagcgctccggcaccaaggccggcaacaagggcgccgaagccgcgttgtcggccctggaaatggtcagcctgctggcgcagttggaggccaagtgagcaatcaagacagcggcaacccggcagccaagccgccgaaaggcaagaccgccgctcgccgcaaggcccgcagcctggccgtccaggccctgtactcctggcagatcgccggccagcccctgcacgagatcgaggcgcagttccgcaccgacaacgacttctccgaggtcgacggcgcctacttccacgagatcctgcacggcgtgccgcgacagaagagcgagctggactccaccttcgagccctgcctggaccgcccgctggccgagatcgacccggtcgagctggccatcctgcggctgtccacctacgagctgcgcaaccgcatcgacgtgccctacaaggtagtgatcaacgagggcatcgagctggccaagaccttcggcgccaccgacggccacaagttcgtcaacggcgtgctcgacaagctggcgccgcgcctgcgcgccgccgagctgcgcggcggcaagcgctgatcccgcgccggcggcgtcatgggtgagttcgagctgatccgccgcttcttcgccgcggccgcctgcgcggcgccggcggcggacgtggccctcggcatcggcgacgactgcgccctgctggcgccgccagccggcgaacaactggcggtctccaccgataccctggtggaaggcgtgcattttcccgccggttgcgaccctttccttcttgcccagcgagccctggcggtctccgccagcgacctggcggcgatgggcgccgcgcccctggccttcaccctggccctgaccttgccgcaggccgacgccgagtggttgcagggcttcgcccgcggcctcgacgccatggcccggcagtgcggcctggccctggtcggcggcgacaccacgcgcggcccgctgagcatgaccctgaccgtattcggcagggtgccggccggccaggcgctgacccgcgccggtgcgcgcccgggcgacctgctctgcgtcgggggcccgctcggcgaggctggagcggcgctggaactggtgctggagcgaagatcggcgcccgccgaggtggccgaaccgctgctggcgcgctactggacgccggccccgcaattcggtctgggcctcgccctgcgcggcaaggccagcgccgccctggacatctccgacgggctgctcgccgactgcgggcatatcgcccgcgcttccggcgttgccctgttggtcgaatgccagcgcttgcaggcaagcgccgcgttgagcggcctgctcgccggcgaggaagccttgcgccagcaactggccgccggcgacgactacgtgctggttttcaccctgccgcctgagtaccttggcgagattcgcgccgcgtggccggccacggccgtcatcggccgggtcgaggcgggacagggggtgcacctgctcgacgccgacggaaaggaactcataccggccgcggccggttaccaacatttcggaacccaacgtgactgagcatcctgatcaggcgccggcgcagccggtgccgccgtcggtctggcgcaatccctggcatttcctcgccttcggcttcggctccggcaccctgcccaaggcgccgggcacctgggggtcgctggtggccatcccgttcatcccgctgtggcagatgctgccggactggggctactggctgatgctgggagtgaccatgctgttcggcttctggctgtgcggcaaggtcgccgacgacctgcgcgtgcacgaccacgaaggcatcgtctgggacgagatggtcggcatgtggataaccctctggctggtgccggagggctggtggtggctgctgatcggcttcgtcgtgttccgcatcgtggatattctcaagccctggccgatcagttgggtggaccgcaacgtgcacggcggcgtcgggatcatgctcgacgacgtcctggccggggtattcgcctggctggtcatgcagggtctagtctggggatgggtacactggctggtctgaggcctcccatgcgtctgctcgtcctgttctgctgcctgtggctgctgcccggcgtcgcttccgccgccccctccgtgggcgagatccgcgtggtcagcgaaacctggacgcgctacacccaggaggacggtcgcggggtggcctgggacctgctgcgggccgtctacgagccggccggggtacgcctgcggatcgccaacgagccctatacccgggcggtcggcctggtcctgcgcggcgaggccgacgcctgggtcggcgcctaccgcggggaaatcgacgaagcgctttaccctcgctggccctatgacgtcgatccgatcgccgtgctttccctgaaagacaatccgccgccgccactggagggcctgagccggttccgcctgtcatggatgcgtggctacgccttcgcccgctatttccctaccctgaccccgcacagcgagttgcagcgccgcacctcggcgctgccgatgctgctcaaccaccgggtcgactatttcatcgattcgcgtccggaactcgaggaaatgctcgcaggggccggagcgctggcggctgagtaccgcatcaccgacgtcactcggttgccgctgtatcttggcttctccgattcccccaggggccgtgagctgctggcgctgttcgaccggcgcatgcggcagttgcatgccagcggcgagctggagcggatcttcgcccgctggaactggccctatgcgccgttgaaggcaatcctgccacccaaggagtgatcatgctgcggctgtgcgtcgccctgttttccagcgttctcgcgttgtcctcgctggccgcgccccaggtgttcgtggtcggcctgttccccggcgcggcggtactcaacgtcgatggccagcgcaagctggtcagggtcggccagaccggcccgcagggcgtccaggtggtcagcgccgacagccgcaaggcggtggtgcggatcgacggcgtcgagcgcacctacgaactgagccgcgaatacaacgaggcaggctattcggcgccgcagcggcaaagcttcagcatcgcccgcggtacgggcgggcactattgggtggctggctcggtgaacgggcagaacatgcagttcctggtggataccggcgccaccagcatcgccatgaacgagaacgaggcgcgccgcctgggtatcgattaccgggtggacggcaagccgatggtcgcctccactgccagcggaacctcgcgcggctggcgggtgaccctggaccgggtgaagatcggcggtatcgagttgctgggtgtcgaggcggcggtgatcgagggtggctatccgaccgaagccctgctcggcatgagtttcctcaaccgggtgcgttggcgcgaggaacagggaatgctgcttatcgaggccaagcattgaatgtcgctcgctcataacccggggttctattcatcgtccatctcgataggtatttgcggcatttcgagctgaccgggcgccggacgctgctggtacaatggcggacttccgtttccctaggagttccccggtgtccgtcgtgttcgtcgccgcctccaaactgccgactcccttcggcgaattcaccatgcatggtttcctcgacgaggagagcggcaaggaacatgtagccctgagcatgggcgacatcgccgatggcgcgccggtgcttggtcgcctgcattccgaatgcctgaccggcgacgcgctgttcagcctgcgctgcgattgcggtttccagctggaaggcgcgcttgccgccatcgccgaggagggccgcggcgtgctcctctacctgcgccaggaaggtcgcggcatcggcctgctgaacaagatccgtgcctatgaattgcaggatggcggtgccgacaccgtcgaggcgaacctgcaactgggttttggcgccgaccagcgcgactacgccatgtgccagccgatgctcgcgcacctgggcgtctcctccctgcgcctgatgaccaacaatccgcgcaaggtcaaggcgctggaaagctacgccatcaccgtggcggagcgcgtgccgctgcaaaagggcctgaacaagcacaacaggcgctacctggcgaccaaggccggcaagctcgggcacatgctcggcagcctgcaccagggcgaggcggaaaccacgtgagtcgccagcaagcccgcggcgcgctgggacgtgcctggtggttgcaactggcgttggcgctgttgccgctgatcctggtcgagttcttcctcggcgaactgcaaccccttccccatggcctggcgatgccgctgttcatcgccgcgctgctgtcgatgttcgtcaacctgccgctgttcggtgcctacaagcgtggtctcatcgccacccagaaagcgctggatacggcggaggaagccgccgcctgggcccgtctggcgcaggtgcgccgcaaggccctgttcggcgccagcctgccggcctggatcggcgtgccgggtgtgttcgccgggctcaacggcgttgcgctgatcctgctcggggtcaccagcctggtgctgttctggctctaccgtattccgcgtcaactcggttgatgcgctcgttctggctgctcgcctgcctgctcctcagcctttccgccggggcggcgcagcgggtggtcagcctggcgccttcgctgaccgacagcgtcctcgaactcggcgcagcgcgccgcctggtcggcgtgctggatggcggcgagcgtccggcggcgattggcgacctgccttccgtcggccgctacggccaggtcaatctcgaacgcctgctggaactgcagcccgacctgatcctggtctggcccggcagcgtgcccgaggcgcagttgcagcgcctgcgggacttcggcatcgccctcttcatcgccgaaccgcacagcctcgacgaactggccctgcaactggctgcgctgggcgaggcattgggcgaggccgaggccggccagcggttgtcggccaggttccgcgaaggcatgcggcgcctggccgagcgctaccggcgggacaagccgctgaaggtgttctaccaggtctgggaccggccgctgtacaccattggcggacgccaggtgatcagcgatgcgctgcgcgtctgcggcgccgagaacctattcggcgacctgccgcagccggcgccacaggtcagcgtcgaggcggttctggcgcgcgatccggcggtcatcgtcgccggcagtcacgcccagctcgaactctggcggcaatggccggcgctggcggcgacgcggcgcggacagctgtaccggatcgaagacaagaacctcgagcggccgagcttcgccatgctggcggcgaccgagaaactctgccgctcgctcgccggggcgcgctgaatgcttgccggtatcgcgcgctgtatcggcggataacgccggtggcgttattcgccctacggcaattggggggtagggcgaataaccgcaacgcggttatccgccgttgtcgctgggtttggcgctactgccggtcgagacgctggcgtaccgccttttcgatgcccgcggcatccaggccgcattcggcgagcatctcgctgggcttggcgtgttcgacgtagtagtcgggcaggcccagttgcagcagcgggacttcgaggccctcgctggcgaggaactcgccgaccgccgagccggcgccgcccatcacggcgttttcctcgatggtcaccagcagttcgtggctgcccgccaattcgcgtaccagggcttcgtcgaggggtttgacgaaacgcatgtcgacgaccgtggcgtcgaggctttcggcgaccttcatcgcctccgccaactgcacgccgaagaccagcagtgcgaccctgccgccgcgccgacggaccacgcccttgccgatctccaccggttgcaggtccggatcgatcggatggttggggccgctgccgcgcggatagcgcaccgcggccgggccatcgaacaggtagccggtggtgagcagcttgcgcagctcgtcctcgtcgctgggggtcatcaccagcatgccggggatgcagcgcaggtaggagatgtcgaagctaccggcgtgggtcgggccgtcctcgccgaccaggccggcgcggtcgatggcgaacagcacgtcgaggtgctgcacggcgacgtcatggatcaactggtcgtaggcgcgctggaggaaggtcgagtagatcgctaccaccggcttcatgccctcgcaggccatgccggcggccagggtcacggcatgctgttcggcgatggcgacgtcgaagtagcgttccggataacgttcgctgaaggccaccaggtcggaaccttccttcatcgccggggtgatgccgagcaggcgcgcgtcctgggcggccatgtcgcacagccactggccgaagacgctggaatacttgggtccgccggtcttcttcggcgcactgccgggagcttccagcttggtgatcgcgtggtagccgatcggatccagttcggccggggcgaagcccttgcctttcttggtcaccacatggaggaactgcgggcccttcatgtcgcgcatgttgcgcagggtagccaccagggtcggcaggtcgtggccgtcgatcgggccgatgtaattccagccgagctcctcgaacagggtgccggggaccagcatgcccttggcgtattcctcggtgcgccgggcgatctcccaggccccgggcaggcgcgagagcaccttcttgctgccctcgcgcatgctgctataggtgcggctggagaggatcttcgccaggtagttggagagcccgccgacgttgtgcgagatcgacatgtcgttgtcgttgaggatcaccagcatgtcggcgtcgacttccgaggcgtggttgagtgcctcgaaggccatgccggcggtcagcgcaccgtcgccgatcacggccaccgacttacgctccttgccttgcaggcgggcggcgatggccatgcccagggcggcgctgatggaggtgctggagtggccgacgccgaaggtgtcgtactcgctctctgcgcggcgcgggaaggccgccaggccgttcttctggcgcagggtgcccatcagctcgcggcgctcggtgaggatcttgtgcggataggcctggtggccgacgtcccagaccaggcggtcgtccggagtgtcgaagacgtagtgcagggcaatggtcagctcgaccacgccgaggccggcgccgaaatgaccgccggtctggccgacggtatacagcaggtactggcgcagctcgtcggccagggtttccaggtccgcctcgcccagccggcgcagttcggccggcgaagaggcgcggtcgagcaggggcgtggcggggcgctcgcggggaatctcatggagcgtcttgggcatcaggctgtcgttatgcaatccggagaggccagcagtttacctgatgcaccggccgcgcccaagcaagggagcccctacctttgccggggacttccgacgacccgtcggtcagttgcgtcgctcgacgatgtagcgggccagttggcgcagcgggtcggcgctcggcggaaaaccgtcgagggcggccagggccaggtcgcgcagctccagggcatagcctttggcggcctccaggccgagcagggcgggataggtcggcttgttgtgcgcctggtccttgccctgggtcttgccgagggtggcggtgtcgctttccacgtcgaggatgtcgtcctgcacctggaaggccaggccgatcgcttcggcgtagcgctccagggcggccagcgaggcgggttcggcgcgaccgctggcgagggcgccgaggcgcacgctggcttcgatcagcgcgccggtcttgtgccggtgcatgacttccagggccgcctggtcgagggccacgccgaccgagccgaggtcgatcgcctggccgccgaccatgccggcggagcctgcggcgcgcgccaggcgggtgagcatttccagacagacggcatgttcctgcggattgcgccgggtgtcggcgagcacttcgaaggccagcgcctgcaagccgtcggcggcgaggatcgcggtggcttcgtcgaaggcccggtgggtggtcggctggccacggcgcaggtcgtcgtcgtccatcgccggcaggtcgtcgtggaccagcgagtaggcatggatcagctccaccgcgcaggccgcggcgtcggcgcgctgcggcgctccgccgagggcctcgcaggcggcgtaggcgagcagcgggcgaacccgcttgccaccgttcatcacgctgtagcgcatggcctcgtagaggcgttgcagttcttcgcggggagcgacgaacagggcgtccagggcggcatcgacgcgcgcctggcagcgcgcctggtaggccgcgatcatgcctcgtcgccttccgcatcgaacggcgcttcgctgagctcgccgtcgcgttcgaggaggatctgtaccttctgttcggcctggctcagcgacgtctggcattcgcgggtcaggcggatgccctgctcgaaggcgcccagcgactcttccagcgacagctcgccgctttccaggcgttccaccagggtttgcagctcggtgagggactgttcgaaatcgagggttttcttgcgggccatcgggggagtctcggcgaggtgtacaaaaccccgcgacactagcagaggggcgggggccgggcaaatcggcggaaggtcgctacgaccgatcgggacgaccatggcggcggccttggctaaggtggagagaggtccagcgaggaggagccgacaggcgatgcgcatccaggaggtccgggaacgcagtattcccctttcccgttacgccggcgtggcggctgccaccggtggtttgagcaccagcctggtggcggtgctcaccgatatcgtgcgcgacggtcggcgtgtggtcggctacggccacgcctcggtagggcgctacgcccagggcgggctgatccgcgagcgtttcgccccgcgcctgctgggggctccggcggacagcctggcgagcgacgacggcagtggcatcgatccgttgcgagcctgggacctgatgatgcgcgacgagaagcccggcggccacggcgaacgctgcgtcgcggtgggcgccctggacatggcgctgtgggatgccgcggccaaggccgccggcctgccgctgcatcgcttcctggcgcgacgcctggggctggcggaagactatccgcagcgcgtaccggtctacgccggcggcggctacccctatccgcacgacgacctgggacgcctggaagaggaactgcggcgcttcgtcgatctcggctacacccacgccaagatcaagatcggcgcggccgggctggaccaggaccggcgccgtatcgacagggcgctgcgggttctcggcgacgcttcgcggctggcggtcgacgcgatgaaccgctacgacgcggagggcgcggtcgacgcagcgaaagccctggcgccgctggggttgtggtggttcgaggacatctgcgacccccacgatttccctacccaggccgaagtggcggatatctatccggggcccatcggtgccggcgaggccttgttctccctggccgaggctcgcttgctggatctctatggcggcttgcggcgggagcgcgacgtgctggtgttcgaccccgtgcattgctatggcctgccgggctacctggcgatactcgaccacctgtgcgcccggggttggccgcgcgcggccttccgcccgcacgccggctacctgttcagcctgcacttggtggcggccctgcgcctgggttgggccgaggctacgccgtcggctttccggccattcgacgatttcgccggtgccctgccgttttcctcgggattggcgggattgccacaatcgcctggtataggcttcgagcgccaggcgacacttgccgggctgttccgcaagcttctggaggcctagagaacggtgattggctggggttgtgcggaggcattaaaaaagccggcttgtggccggcttttctggggtggggttggcttacttctgataagccgcgcctgccttaggaattctgcatcgacgagccgagggctcgtgaaggaagcgctactctagcaaactcggccagtcctgcccagcatcccgcggggctctatttcgccggctgcgagcggcgcctggcgagagcgctcagcacttgggcgacgagggcttggccggcttgctttgcttcaccggcgatgccttgggtggctggggcgcgggagcggtatccggactcagaccctccacgcggtagcgccaacccttgacggctgagacctgcccgtcggcgaagcccttgctgtcggtcagttgcaaccagtactggcgctccagttccagaagctggccctgcagcgtgccgccggcgaaactcttgagcgtgaaggtcagcagcggtttttgccgcgaggccttggccggcgcgacctccagcagcctgagcgcagcgaacaggcgtgcggcctgctcggcttccgcctcgcccatcaactgtggcctggatgggaactgtcgcaggcggatgccatcgtccttttcactggctcgggaaatgttcagccgtacgccgttgccataggacagggtcagttcgcgcaactgttcgaatggcaggtcggtcaaccgagggtcgagcagggccaggtcgttgaccggcaggccgaccgttcggtcgatcagccaggcctcctcatcgtcggcctgcctgaccaactgcccgccctgcgaggtgcgcttgcccagcaacaggaccagcggcggcgcgtcgccgcgctccagggtgatccggctggcctggcccttgccctggtcggagagtcccatgcgttcgcggttttccggcgaggcgctcttttcctccagcaggcgcgcgtcggccaggctgcgcaacagctgccggatggtttcccccgaggcgggatagccgtccttgctggcgagcgtccagtccttgccatcgcgcctggcgcggatcgtcggttggccgggggtggcgatgcacagcgcggtcacctggtgcggtttcagccctggcagccaggcgcggctcgcaggcggttgcgcgggcggttgctgccgttcgtggagccagcccaagattccggcgaacagcgccagggcgagagcgagtcccgctacgttacgcaggcgcatgtcagcccctcctccggcgcatgctgcgccagctccaatgtagcaggaggaacagggtgagcagtgccggcagcaggaccgtattggccagtttcacctgttcccccaggcgctcgacatcggcattcagctggaactgcaattgacgtagttgctggcggatgcgcaatttgtcatcgatgaagcggcgcagcgtcgcttccatttccggagtcacctcctggtcgccggcgtccatcgattgctgcaaggtgcgcaggttcctgtcggtgtcgttgaggctttgctgcagcgcgttgagctgttcctgggcgcgcagcccggcctcgcggcggagcgcttccacgcgggtgaacgggcgcttcgtatggcctcgcgagcgtaggtcgatcagcgcgtccgaaccggagaggtagtcgagggcattgccgacgaacaggtcgttgtccgcccatacctgcggctcgttgtggccgggctgttcctggagccagagcggattgctcagcaggtccgtatcggcgaccaacagcacatggatgttcgcgctgtcgctcaggccttcgccttgcttcccgcggtccgcagggaaggcactcgtcgccggcccctcgaccttggcggccagcacgtagcgttccccggtcggacccagggtggcgttgagctgctccgtcgaggattggcggaagcgttccagcgacagcggcatgctgtgcgccgagctgtgcagcaacggaatgaagcgcgtcgaggctccgccgagaggttcgagcaggccgacgctggcgaggttgaggctttccaggccggtggtcagcacgttgtcgtgggggaacgtgtcgccggggaggtgtagccaggtcggattgcgctccgggcgacgttcggcgttgggcttgatcatggcgaacgaggcatccgccagcagggtatccggccgcaactggacgccccaggagcgcagcaacggggccaggtcggagcttttcccgccgtctgcatcggcgagactcagagggtcgacgaaggccagcagcttgccgccgcgcaggacgaactggtcgatggcgtattgggtctgttcggacaattgcctggggtgcaccagcatcaacaccgagacgtcggcggggatttccgtcgaagcgagccccagggtgcggatgtcgaactgttggtagagcttgtccatcatcgcccagggcctgctgcccggctgcctgtcggtgggcgcctgcccggtcatcggcagcgagctcatcaggccgactaccgtgcgttcccgctgtgcgagtgcctggaccaggcggctgagatcgtattccagaagcggctcttcttccggcgagaagaacgggatcacctggaggccgtcggtcgggttggtggccgccaggccaaagtagatggcttcgccattcgggccgatgggcggcgcctgcaggccgaagcgcgcggcacggtcctcgtcgtcggagaatggcaggggatcgatcacgaacaatcggacattgccatggctccgccgtgcatagaggtccagcacttcctcgacgcggcgggcgtagttgcgcagggcgggcaggtcactggcgcggcttttcgaaaagaacaggtagaggttgagcggttcgtcgagactgtcgaggacttcctgggtgccggcgctgaaggtgtagagcttctgctgggtgaggtcgaactgctggtcgcgcagcagcaggctggacagcaggttgaaagcgaggaacagcaggccgaccagcagcaggccgacgcccgagtacagggttcgtttcatggatgtttcctacgctgcctttttcaggtcgatgacgatggtggtggcgaccagccaggcgacgatcaggctgcagaagtaggccaggtcgcggacgtcgagcacgccccggccgagcgcctcgaaacggaccagcacgctcagcgaggcaatgccgtccagcagccattgcggaagccagccggagagcgcctgttgtacgtggggagtgccggcgccgacgaatagcaggcagacgagaacggtcagggcaaaggcgatgatctggttcttcgccagcgccgacatgcaggatccgatggccaggtagccgccggacagcagccagccggccaggtagccggcgatgatcgcgccgttgtcgggcgagccgaggtagttcaccgtcagcggcatcgggaaggtcagcagcaacgccagcccggcgcagaaccaggccgcgaggaacttgccggtgaccagggtggcgcgggagacgggcagggtcatcagcatctcgatggagccggacttgcgctcctcggcccacaggcgcatggccagcgcggggatcagcaggaggtagagccagggcaggctggaaaagaacggcgccaggtcggcctggccgcgctcgaagaaatcgcccaggtagaaggtggccacgccggagaggacgaggaataccagggtgaacacataggcgagcggcgtggcgaagtagctgcccagctcgcgtctgaaaatggtgccgatggcggtcatgcggggggttctcgggtcagttggcggaacacttcttccagttggccgtgttcggtacgcaccccggatacccgccagccgctgccgtggatcaggcggttgagcgcgggaaggatctgcgcgccggggcgggccagaatggtcagggtgccggcccggtcggggcgtccttcgataccggcgacgccggggagcatggcgatggccagcgggtctaccggtgcttcgatgctgaggctgacggcatggtggtagcggctgcgggtcctgagttcgcccggggtgttgtcggccagcaggcggccgccgttgatcaccagggcgcggctgcacatgaacgagacttcctcgaggatgtgcgtggaaatcaccacgatcttgctttccgagaggttcttcaccagttgccggacctggtgcttctgattcgggtcgaggccgtcggtgggctcgtcgagcaggagcagctcgggatcgtggaggatcgcctgggccagcgcgacgcggcgcttgaagcccttggacagggtttcgatgatgctcctgcgctcatcccgcagctccatgcagtccatggcgctgtcgatgcgccgacgtttttcccgtccgctgtagtcgcggatggacgcgacgaaggcgagaaagccctcgaccgtcatttctccgtagctgggagcgttctccggcaggtagccgatcagcttctgtgcctggcgcgccttgtcctgcatgtcgaagccgaagatgcgtacgctgccggcgctcggcgcgaggaagccggaaagcatcttcagggtggtcgacttgcccgctccgttggggccgaggagaccgacgatctctccccggtcgatgcggaagctcaagtcgtttaccaccgtccggccggaaaagcgtttgctcagtctgtctatgtcgatcatggtttcactggaagttgagccgtttgctgatatgcgtaggggatcgcatgagcgcggtagattaccgggagttattggctggtttttccagtgggctctttttaagattagttacttatattgttgggaaacttcctacgaactctcgttaaaagatggaagttatcgagacttccagggcagccctgtagctggcgcagcgccttggttccgctgtgggaacgcggccatgtcgcgctcgctggtgcctatgttggggacgcgtcgattccccctgcggagtttcacgagggaaggcagttgccgtttcgatagacgggaagcggaatagcccggccgcctggatcttccgaacttcgagaccaatgcaagttggaggaagacccgacttccgccagtagcggttattcctcgcctttcagcagcggaaggcgaatctcgaaagtggtgccctggccaacctggctctggcaaccgatcctgccgccgtgccggtcgatcaccgtcttgaccatggccagccccaggcccaggccggcgctgccctcggcggaagcgaagcgctggtactggctgaacaggcgcggtagttcggcggccgcgatacctttgccctggtcgacgatccggcagctcagccagtcgccttcgaggcggatgctcaggctgacgacggtccccgccgggctgtacttgaccgcattctccagcaggttgaacagcgcgcgcgtgagcaggccggggtcggcccagaccatcggttcctgctcgtcgtcccagtcgcgccgcaggtcgatgtctttctgttgcgcgaggggccagagctggtcggcggcgtccatcgccaacatggtgaacatgcacgcttcgaagcggtaggcgtcggattcggccttggccagttgcacgaaggcgtcggtcaggcccagggcgcgacggacctgctgctctatctgtcggtagacctgctggccggcttcgtcctcggcggggcggacgtcgagcagggcgaggatcgccgagtgcggcgcgcgcaggtcatgggagaggaagcgcaggagggtggcgcgctggcgctcggcatcgcgttcggcgctcaggtcgatcaggctcaccagccagccgatggcggtttcgctttcgaccggcagcaggcgcgccaggtcgaggcgcaggtcgcgttcccggtggtcgcggaactcgatggcttccagggtttccagcgttgggcgggcgccaccggcgaggctcggatggccgagtccggccaggcgctggcgcagttcggcgccgcgcagctcgccgccgaacaggtcgcgtgccttgcggttggccagcaggatctgcccctgcgggtcgcagatcagggtcgccaccggcaggccttccaggccgtcggccatgaaccgccggctgtcgcgggtgcggctgaccgcctgctccagggcggcgatgcggttctgcaatggatcgttgccggcgcgcggggggctggcccgctcgggcagcaccttgggctcgcggtcgaggcgcgccagttcccagccgaagtaggcgagcaccgcgttcagccggcgccagctccagatcaggtaggccagcagcaggccgaccaggctggccagcggcgaccaccaccagccgttgagcagcagcgcccaggaaagacccagggccagggccgcgcaggccagggtgaggagcaaggcgtggcgcgagcggaacagcatcaggccgagcagcagcgctacgctggcggcggagagcagggcggcgagccagggttgcaggtcgacggcggtgcgctgctgcaacaggccgttgagaatgttggcctggatctccacccccggcgtggtgccgaggctggccgacagcggggtgacatagcggtcgccgaggcccggcgcggtggcgccgaccaggaccaggcggtcgcgcagcaggctgtctggcacctcgccgcgcaacacgctgacgtagggcacgctggggaagcccgcgtcggcaccgatgaagggaatgcggatggcgtggtcacgctgccagccgggcaggttgcgcatgtcgtcgaggccgggcatgggcatggcgccggcatcggcgaatgcttgccaggcgagcagcgggcgcggctggccgagcggtccttcgcgcaggtagacgctgcgcaccgtgccgtcgctgtccgcttcgacgttgatatgcccgatgccggcggcgcagccggccagcggcgcggtcggcggtatctcccgtggcggttcgccgtagcgcggcacgctttcgcgcagcagtggcaggaggacgttgccggcccggcacagcgatcttgccaactggcggtcgctgtccggattggaggagggttcgctgaagatcacgtcgagcagtacgctgcgtgcgccggcggcggccaggcgatccagcagctcggcgtggacgctgcgcggccagggccagcgaccgaggctttccaggctacggtcgtcgatggcgacgacgaggatgcgcggatcgacggccagcggggcgaggttgcgcaggcggtcgtagagcaggttgttcagcggcaggccgctgctcagcgaaagcagggcggtgagcggaaggagcagcaggctgaccagcagccattcgcgcaccaggccgcggaacagccgctgcgcctggctgggctcgtcctggcggtcgagcgccttcatcggcgaggccccggcgccctatcgggcactgccgcctcgcgggtagtagagaatgtcgtatacgctggtctcgccctccagtccgtcgttgtcgaaggccgagaggcggacgtggtagaaggccgccttgagtccgctgaaactgacttccggggtgctcgagaaacgctcctgctggatgcgcaggaagtccggatcgctggctacctgggcacggtagcgcttggcgccgtgcagcggggcaagatagagcttccaaaccggcgactcgccgtgctcgccgccctggccgcgcaattgcggggcgggtagcaggtccaccggcgtcagcttgccctgcggcttgaccttcaggccgcggcgggcgtcgaccagcacgtcctcgtccggctcggcctgcgccgccttgcgggccgggcgcctgccgttgagcggcaggtcgtcgctggtcagctcgcggttcaccgcgacgcgcccgtcgagcacttcggtcagcgcctggccgtcttcggtgcgggcgcggaagtgggtaccgcgcacgcccagtacgccgaccggggtcagcacctggaagcggtcgtgatcgctctttctcttcaggacataggactcgacctgccccgcgcgcagggcgatctgcggaatgccggtgtcctcgtcgaggtgcagggtgacttccgaactggagggcaggacgatgcggctgccgtcgccgagcagcaggctgacgaaggcggtcggagaggtcttgacgccttccagttcgtcgatgtccatgccttcttccaggggcgtctggttgcccttggcgtcgagcttccaggcgtcgccggcgagatagagcacgctggcggggagcggctggggcaggcacgtttcgccctgctcgatgaacggcggccgttttgtcttggccggcgcggccgcgacggagccggcgagcagcgtcaacagtccgcccagcgccagggcggcgcaagccggaaagagggatcgggaagtaagggcgagggctgtcataggcttcactgggcggcgggtcaggtatcgctggcggtccggtcaggctgcaatctgcctgatcgggcgccggtttcgcaatccttgcaacgacatcgggagcccgcaggctcccttgtcgtttcctcggccgcagcgcctggcggttgggccaggcgcttcggttcagtcgttcttgtcgccgatcaggcgataggccagggcgccgagtaccgcaccgagaatcggcgcgacccagaacagccacagctgggaaaccgcccagtcgccgacgtacagggcgaccgcggtgctgcgcgccgggttcaccgaggtgttggtgaccgggatgctgatcaggtggatcagggtcagggtcaggccgatggcgatcggcgcgaagccctgcggcgcgcgcttggaggtggcgccgaggatgatcagcaggaacatgccggtaagtaccacttcgctgaccagcgcggcttgcaacgagtagccgcccggcgagtgttcgccgtagccgttggaggcgaagccggcggccaggtcgaagccggccttgccgctggcgatcaggtacagcacgccgccggcggcgaggccaccgaggacctgggcgacgacatagggcagcagttggctggccgggaagcgcccgccgacccacaggcctaccgataccgcggggttcaggtgggcgccggagatcgggccgatggcataggccatggtcagcacgctgaggccgaacgccagggccacgccgaggtagccgattcccagttccggtacgccggcagcgagtactgcgctgccgcagccgcccaataccagccagaaggtgccgaagaactctgctccgtattgcttcatgatgaggtccttttcagatccaggatgggacgcggatcgaggcgtccggatagcgggaggggatgattcgaacaaggaaggggagatgacacatccgtgtgtcgaagccagccctggggggattggctcggttgcctggggcgatcgtccgttaccgacccctgactgtggttcgagtggtctcgttccacggcccgccggagcgggtttacacatccctgtgtcggagcaatccatttgctccttggcctactcagcggttggaaatctaccaagcgcgatttgtctgctgtgagatttgccatatttcttcagattcttccgcgctatttcagattcgtcgcgttcaaaacacccagcgcaactcgtcacgcacgctgacggcgccggacaggccgacgttccacatctcggccctggcgcgggccgggccgtcgaggccgagcggagtagcgaaggacgggctggcggtgccctggctgaacgacggggcctggaccgggccggccggatggcttaccgattccaggccgaggaccagggcaaggcaggaaaacttgccgagggcctgcaggttgatgtcacgcaaacgttggctaactggccggaaacccatggctacgactccttgataggtcaggctggcgctggctcgcgggctcttcgtcccgcttaatggctatttggaatcaggctatcaagggctggtcgcgaccagagagattcgtcacaattcttcagatttgtacgtaattcgccgttcctggagcgaaaaaggggcgttagcccgattgaacaggaccagcttttatgcgtgtcgcgatactggacgacgagtcggccgaactggaccgggtcgagcagaccttgcagcagatacccgcgcagggcgaacaggcctggacggtgcaccgtttcgcccgtggcgaggacctgctcaagcagctcaagcgggaaaccttcgacctgctgatcctcgactggcagttgccggacctcagcggcctgcaattgctgcgctggagccgcgagcatctggatgcgccgccgccggcgatcatgctgaccagccgtgacgccgaacaggacatcgtgcaggcgttgaacagcggcgccgacgactatgtcagcaagccgttccggcccaacgaactgaaggcgcgggtagccgccgtgctgcgtcgccacgggggaacgcgtcccgcgcagcatgaggtgcagactttcaacgacctcagcttcgacgatgccgagctgaccgtgacccgggccggcgcgccgatcagcctgaccgagcgcgaataccgcctggcccgctgcctgttcgccaacctgggacggccgttatcgcgggaatatctctacgagcgcttctggccccacgaggaagtgttgtcctcgcggccgctggatacccacatctatcgcctgcgcaacaagcttggcctgaccgccgagcgcggttggcagttgctgaccatctacggctacggatatcggttggagagcgtggcgacggtcgactgagcggagcggggtggcgagaccgaccttggcggtcggcgagggagaatgaaaaagccccgcggctgcggggcttcttttcggcgaggcgcgcttacttctggaacgcggccacggccttggtgatctcggcgcgggcggcgtcggcgttgccccagccttcgaccttgacccacttgcctttctcgagatccttgtagttctcgaagaagtgcttgatctgctccagcagcagggccggcaggtcggtgtattccttcacgtccttgtacaggacgctcagcttgtcgtgcggcacggcgatcagcttggcgtcgccgcctgcctcgtcggtcatgtgcaggacgccaaccgggcgcgcgcggatcaccgaaccgggagcgaccggatagggggtcaccaccagcacgtccagcgggtcaccgtcgtcggccagggtgttcgggatgaagccgtagttggccgggtagaacatcggggtggccatgaaacggtcgacgaacaggcagtcggtgtccttgtcgatctcgtacttgatcggcgcatggttggccggaatctcgatagcgacgtagatgtcgttcggcaggtccttgccggccgggatcttgctgtagctcatgggtgactccagaggtttctggccaaaaaagaggccgcgattataggcatattcggttgtcgatgccatgtaccggcattcagccgttagtcgtgtcgcccgccgcctcgcggtagtccggatgctcggcctgcaggcggcgcaggcgttgcagcgggtcctggcggtagaacagctggagctgccggtacaccgccggataggcctcgtggaggagatccggggcggtgaagaaatactcgctggtaacggcgaagaactccgccggatcttccgccgcatagggatcgatggcggtctgcgcgtcgggatcgcggtcgagcagggcgttcatctcgtcgtaggcggcctgcatggcgctcgcccagtcgccgatgcgcatgccggcgtgcagcggcggcaggccgttggcgtcgccgttgagcatgtccagcttgtgcgccagttcgtggatcaccaggttgtaggcatcccagccacccccgccgacgacgccgggccaggccaggaccaccggcccttgcagggaggtctcgccgctgcgttcgtcgtcgaactcatggactacgccgctggcgtcgcggtgtttctgcgggctgacgaaatcgtcgggatacagcaccagctcgtggaagccctggtaccagttcagctccggcaggtgcaacagcggcagttgcgcctgcgccgccagcagcaggcggccgaagtcgtcgagatcgacgccggcgagtgcggtcaggtgcttgtcggcgagaaacagcacggcccgctcgcgcaggcggcggtcctcgtcggcgtccaggccgtcgaggatcggcaggtgccggcgtacccgctgccagagctcttcggccaccgggtggcgcgccagcaggcgccggcgccgccaggcgcggaacgaccacatgctcagtcgctctgggccttggcctgtttggcggcgctcgcctgcaggcgatggcgaatgaagccgaggatcatcggcagcagcgacagcaggatgatgccgatcaccagcagcgacaggttcttcttgatgaacggcacgttgccgaagaagtagcccagggtcaccaggccgccgacccaggccacggtgccgaccacgctgaacatgacgaagcgcggatagtgcatcttcgccatgccggcgacgaagggcgcgaaggtccgcacgatgggcaggaagcgcgccagggtcacggtcttgccgccgtggcgttcgtagaactcatgggtgcggtcgaggtagtcgcggcggaataccttcgagtcggggttgctgaacagccgcttgccgagggtccggccgatcacgtagttggtgctgtcgccggtgatcgccgcgaccatcagcagcccgccgagcagccatgggtccatgccgccggtggcgcagatggcgccggcgatgaacagcagcgagtcgccggggaggaacggagtcaccaccaggccggtttcacagaagatcaccaggaacaggatggcgtagatccagacgccatagttgctgaccagcatggccaggtaggtatccaggtggagaatcagatcgattgggttgaagtccattgagcaacctgcggagacaacgcgttgagcggcagagggccgccattataggggggcgtccggatgggtggggggctgtttgtcgcgatcccggcaaaaccactgattgcaggatgtttcggtaatttttccgaaattggtcggcataaagtctgcaagaacaggagaaatttctagcagggaagggcgtgcgatgacactccagccttttgcccagccaccgctcagtctcgccctgggcgccgggcgcgacttgccggggcaggccgcgcgggttcgcgccgaatggctcgcgcctcgccccggacgggctccggcgtttctcctggcgctgctctggggacgcggttgcgccaacgtggtgcaggccatcgaaggccatctcgacgcactgttcgccgactacgcctgtacccccgagggttggccggaagcgcaggcggcgcggcaggtcctggcttcgctgaacatgcagctctatcgccggcgccgcgaaggcgagccgggcgtgctcgagctggcggcggggttgctgctggtccatgccggaggcgtgcactttctccagtgcggcgccgtcggcctgctgcgttatcgccagggcagcctgcagcgcctgggagggagcggccagccgctgggtagcagcgcggagctggcgctggtccagcacaacctgacccaggtggccggcgagcccttgttgctggcgccccagccgctgctcgaagtggccgacctgcgcgccctcggagagcgttgtgcggggctggccacggggcgcctggagggcgtgctgcagccgttgctgcatgcgccgggggcggtggcgctggtcttgccgggggcgctcgagcgcgccccggcggcgccacggcataccggctggccagcgctgggcgcggcgtgccccggcgactgcgtggatggctggaccttgcaggcagcttgcgcgttcggcccgcccgggcggctattccgcgcctgcgacgagcaaggacgcgaggcgttgctgctgctcgcggcggtcgatgccgacgaagcgttctggcagcgcgaatgggcattgcggcgctgccgtgcggagagcctgccgcgagtattgtcgtcgccccggttgcgtcgtcatgccttccagttgttcgctccgccgcgctggccgatgcgcagcctgctggattgggcgccagcgcacctgccgctggaaccgcaatgcgcgctggtcctcctggagcaacttatcgatgcggttcgcgccttgcagcggcgcggcgtacagggcttgtggctggcgccgcggcagatcctgctggacgagggcgggcgcctgctgttcctccccgaggcggcggcgatcctgccgggggtggcgcgccaggcgctgcctgcggacagcgtgccgctggcgccggagttgcgtcgcggcgaggcgctcgatggccgggccgaccagttcgccctggcggcgctgttctattggctgctctgtggtcgctggccgtcgatcgcctgcccggagagcgacggcggatgccgctacgagcccctgggcgagcgtcaggcggacctgccggtcggctgggatggggtattggcgcgggccctggcgccgcgtccggaggcgcgcttcgaagcgttgtcggaattctggctggccttgcagaagccgctagcgcatccccagcgagtcttcgcgccacgccggttgcaacggggcgtgctggccctggtcctgctcctggccggggctgcgctgctggtcggcctggccggttaacggatcgacggccagcgtgcgggtctgcccgctgcgttcgaggtgtgcttcggcgatcagttgttccagccggccgctgcgacgcatcaggcgcaggttgcggtcgaggctggcggcaagggcggcgccgcgggcgtgtcttttcggcaccagtacatagagcggcttgacctccagcggcggttcgatgaacaccaggcgatccttcagcgccggcacgttgcgcgccagtaggtggtagccggtgtagcgatcgaccacggccaggtcgatacgcccgcgcaggagcttctcgaggttctgccagtcgttggtcaccgcgtccttggtcaggctgcggtcggcgtcgaaatcctcccggttgacgtagccgcggaccacgccgatgcggtacggacgcaggctttccagatgcgcgggattgaccggcagcaggcgctcgcgctggcggaagaagcccagttgcgagtcgagcagggggatggtgacgtggaacagttcgcgccgctcgggcgacaggtaggccggcatgagagcgtcgaagcgcccctcggcggcttccttcagggcacgttgccagggcaggaacaccagttcggcgcggtgcccgtcgagggccagggcttcgtcgaggatgcggctggcgaggcccttgcccggcaggtcggggccgacgtagggcgcccagtcgagggtcgccacgcgcagggtgtcggcctgcgcgccggccgtggcgaggagcaggccgagcaggacgccgggccagtgccaggtgcgcgaacccatggatgcctctgctctgagcgatcggttgggaagtgccgtgcctttgtcttcagcttagttcgtcgctgatcggcagggtgtagttcttgaactcctggtcttcgcggaagccgatcgactcgtagactttctgcgctacctcgttgtcgacgctggtggagacacgcatgcgcaccgcatgggtttcccgggccatctgcttggcgtgttgcagcaggtggtcggcgaccagttgccggcgcgcctcctcggcgacgtagatgtcgttgaggatccagacgcgcttgagcgacagcgaggagaagctcggatagagctggcagaaaccgagcaggcggtcttcttcgtcggccagcgccaggtagatcaccgactccttgcggcgcaggcgtttctcgaggaatttccgcgaggactcggggtaggagagcatgccgtagaattcgcggtacttgacgaacagcggcgccagcaggtcgaggtgttcgagggtggcttgcacgattcgcatgacgggcctcgcattgcgggaaggggctgccgggacgatgcaggctgcatgccagcaacgcttcgatgctgcccaatctccctggaaagcgcaatccaagcgaacgtttgaatcggtcgaaggaggggcgtcgcgcgccggcccatccttcggccgggaggctcagtccctcgccaggaggaagttgccggtgcgcggagcctcgccgtccagcgcctggacctccgcctcgtccttcaggttgaccccggaaagctgccgccggcaggcctcgcgcatcaggtagagtaggcggtgcgcggccatgccgtagctgaggccttccaggcggacgttggagatgcagttgcgataggcgtcggtgaggccgacccgcggggcccaggtgaagtacaggccgaggctgtccggcgagctgaggccgggacgctcgccgatcaggatcacgctcatcttcgcccgcagcaattcaccgatctcgtcggccaccgccacccgtccctgttccaccaggaccaccggcgacagcgaccagccttcggccagcgcctgttcctccaggcgttcgaggaagggcagggtgtgacgctgcacggccagcgcggagaggccgtcggcgaccacgatggccaggtcgatctgcccgtcgtagccggcggcgtgttcgcgcaggcgttgcaccgaggcctcgtcgaggcgccggccgaggtccgggcgttgcaggtagacgtggcggtcggcggcggcgctgtgcagcagcaggctgtcgcggccgcgctggcgcaggccgtcgctgatggccgcatggtcgaagggcaggtgcacggcgtcgcgcgcctgggcgtgggcgtactggaagtccagttgcgggcgggtcggcaggctggtgccggtgcggcccagggcgatccgcgcgggggtcagctggcgcagcggcagccaggggttctcggcgctggcgtcgggcaggtgcttgtcgttcatcggcatctcctcaggccagttgcgccagggcctggcggaacgccggcggtaactcgtcaccgaagcggatgcgcccgtcggcctgggtgaagattcccatccgctgcaaccagtcctcgaattccggcgccggcttcaggcccagcgtctggcgcgcatagagggcgtcgtggaaggaggtggtctggtagttgagcatcacgtcgtcggagccgggaatgcccatgatgaagttgatcccggcgacgcccagcagggtcaggagcatgtccatgtcgtcctggtcggcctcggcatggttggtgtagcagatgtcgcaacccatcggcacgccgagcagcttgccgcagaagtggtcttccaggccggcgcggatgatctgcttgccgttgtacaggtactcgggaccgatgaagccgaccacggtgttcaccaggaacggcttgaagtgacgagccaccgcataggcgcgggtctcgcaggtctgctggtcgacgccgtggtgggcgttggccgagagcgcgctgccctggccggtctcgaagtacatcaggttgttgcctagggtgccgcgcttctggctgagcccggcctcgtagccttcctggaggatcttcaggctgatgccgaagctggcattggccgcctcggtgccggcgatcgactggaacaccaggtccagcggcacgccgcggttgatcgcctcgatggagctggtgacgtgggtcagcacgcaggcctgggtaggaatctcgtagcgctggatgatcgcgtcgagcatctccagcagggcgcagatcgaggccatgctgtcggtggcaggattgatcccgagcatcgcgtcgccattgccgaacagcaggccgtcgaggatgctcgcggcgattccggccgggtcgtcggtcgggtggttcggttgcaggcgggtggagagccggccgcgaaggccgagggtgttgcggaagcgggtgaccacgcggatcttctgcgccaccaggaccagatcctggacacgcatgatcttcgataccgccgctgccatttccggcgtcaggcccggagccagggcgcgcaggctggcctcgtcggcggcgtcgccgagcagccagtcgcggaagccgccgacggtgagatgggacaccggggcgaaggcgtcgcgctggtgggtgtcgatgatcaggcgggtgacctcgtcgtcctcgtagggaatcagcgcctcgtcgaggaagtgtttgagcgggatgtcggccagggccatctgcgcggcgacccgctcgccgtcgttgctcgccgcgacgccggcgaggaaatcgccggagcgcgcggggctggccttggccatcacgtccttgaggctgtcgaagcggtaggtttcgccgccgacgctatgggtgaaacgtgccatgtgtgtctccagtgcccggcctcgccagcggcgggccgggctttgtcgttgtcgctctcagcgcaggtcctgttccgccgcctggatcgcggcgaactcttcttccggggtgccggacaccaggtgatgccgactgtacagggcgaagtagccgatcagtacagcgtagatcgccaccgcgccgaccacgacccgcgggtcgaccaggaagccggcgaccaccgcgacgcaggccagcgccagggctacgccggaggtgaggatgccgccaggggtgcggtaggggcgctgcatgtccgggcggcggatgcgcagggtgatgtgcgcggccatcatcagcacgtaggagatggtcgcgccgaacaccgcgaccaggatcagcaggtcgccctggccggtcagcgacaggccgaagccgatcacccccggcaccaccagggccagtaccggcgccttcttgcggttggtcagcgagaggctgcgcggcaggtagccggcgcgggagagggcgaagatctgccgcgagtaggcatagatgatcgagaagaagctggcgatcagcccggccaggccgaccaggttgacgaactggctcatccaggtcgaacccttgtaggccgactccagcgcttccaccaggggattgcccgagcccatcagctccttggctccggcggccccgggaccgacgaccagaatcagtgcggcgaaggcgagaagcaccaacatggcgccgatcagtccgcgcggcaggtcgcgcttggggttcttggtttcctcggcggccagcggcacgccttcgacggcgaggaagaaccagatcgcgtaggggatcgccgcccagaccccgacatagccgaacggcaggaagctgctggcgccggtcgccgcggtctgcgggatgttgaacaggttggccgagtcgaagtgcggaaccatcgcgacaatgaacacgccgagggcgatggccgccaccgcggtgatgacgaacatcagcttcagcgcctcgccggcgccgaggatgtggatgccgatgaatacgatgtagaacaccaggtagatcagccagccgccgacgccgaacagcgactcgcagtaggcgccgatgaagcaggcgatggccgccggggcgatggcgtattcgatgaggatcgcggtgccggtgaggaagccgccccagggcccgaaggcgctgcgggcgaagccgtagccgccgccggcggtagggatcatcgaagacagctcggcgagcgagaagcacatgcacaggtacatggtagccatcagcagggtggcgaggaacatcccgccccagccgccctgggccaggccgaagttccagccggcgtagtcgccggagatcacgtaggcgacgccgagcccgaccagcaggacccagccggcggcgcctttcttcagttgacggtgttggaagtagtcggcgtcgacgctttcgaagtcgaccccggaagttgtgggcgcatggccggtttgttcgagggacatgggtttttcacctcaatcttgttgttatcgaccccggttttcccggtggtgtgctgtacgtggtgaacgcaggcaatagctatgccagccgctctgcaatcggcctggcgaggaggtggaaggggcgccgccgtcagcctcggcggcgtgtttcacgagccggcgcgaccgctccgggaaagagcggtcgcggccggtccggggtcctactagaagaagcccagcgggttgatgtcgtagctcaccagcaggttcttggtctgctggtagtggtcgagcatcatcttgtgcgtctcgcgaccgacgccggacttcttgtagccgccgaacgcggcgtgggccgggtacaggtggtagcagttggtccacacgcgaccggccttgatcccgcggcccatgcggtaggcgcggttgatgtcacgggtccagaggccggcgccgaggccgtactcggtgtcgttggcgatggccagggcctcggcttcgtccttgaaggtggtgacgccgaccaccgggccgaagatttcctcctggaacacgcgcatgccgttgtgccccttgagcagggtcggctggatgtagtagccgcgccaggttgccttcgagcttctcgacgctgccgccggcgagcagctcggcgccttcctgctgggcgatgtcgaggtaggagaggatcttctcgtactgctgctgggaggcctgggcgccgaccatggtctcggtgtccagcgggtcgccgcgcttgatcgccctgacctttttcagcacctcctccatgaacgccgggtagatcgactcctggaccagcgcgcgggacgggcaggtgcacacctcgccctggttgaagaaggccagcaccaggccctcggcggccttctcgatgaacgccggctcggcctgcatgatgtcttcgaaatagatgttcgggctcttgccgcccagctcgacggtggagggaatgatgttctccgccgcacacttgaggatgtgcgagccgaccggggtggaaccggtgaaggcgatcttggcgatgcgcttgctggtggccagggcctcgccagcctccctgccgaagccctggacgacgttgagcacgcccggcggcagcaggtcgccgatgagttccagcagcacgcagatgcccagcggggtctgctcggccggcttgagcaccacgcagttgccggcggccagcgccggggccagcttccaggcggccatcagcagcgggaagttccacgggatgatctgcccgaccacgcccaagggctcgtggatgtggtaggccacggtgctgtcgttgatctcggcagcggagccttcctgggcgcggatgcagccggcgaagtagcggaagtggtcggcggccagggggatgtcggcgttgagggtctcgcgcacggccttgccgttgtcccaggtctcggtgacggcgagcagttccaggttctgctcgatgcggtcggcgatcttcagcaggatgttcgagcgctcctgcaccgaggtgcggccccaggcgtcggcggcggcgtgggcggcatcgagggccttgtcgatgtcctcggcggtggaacgggggaactcggcgatcggctggccgttcaccggcgaggtgttggtgaagtactggcccttgaccggaggcacgaactcgccgccgatgtagttgccgtagcgggccttgaaggaaacgatggcgccttcgctaccgggatgggcgtaacgcatgatggtatctcctggctcttgtgcttattaggggaggacgcgctgtcgcgcttgtcgtaagcctggagcaagggccgggccagagtggcgaaaggcccggagtagagcgtcctgaaggtttcgcaggggagcttgcgaacgctacctgtcacgcgggcgggacgctcgtgagtgacactctgtaccgttttcggcgcagcgcatgactcatcggtcagtccgtcgttgcattgcgccccggcctgttggatgctgcaccgatagccgtccggagagtcgcggaccgatccaccgcgcccaggcaagagacggcccgtccctcgcggagaaccataacaatgcctgccagttccatgagccgccacgcgcggcaagtgctgaccgtcgcccagggcaagatcccgccgggcggccctgcgaccgatccgtccatcgcccgctcctggctgcgctgcctggaacagcaccatctcgatcccggccagccgatggcgccgatggtgctggagcacgcgcgcatgctcgaacgccgcgagcgcctgcaacaggtgctggagatcgccgatggcgagatgcacagcctctatcagcagctttccggcaacgaccacgcggtactgctcaccgatgcccgcggggtgatcctcaattgcgtcaacgccgacgcccagcgccagaccttcgaacacgccggcctctggctcggcgccgactggagcgagccctgcgaaggcaccaacggcatcggcacctgcgtggtcgagcggcaggccctgaccatccagcaggaagagcacttccgtagccgccacaccggcctgacctgctcggcgagcccggtgttcgatccgcagggcgagctgatggcggtgctcgacgtgtcttcggcgcgccaggaagtctcgcggcagagccagttccacaccatggcgctggtcaacctgtcggcgaagatcatcgagggctgctatttcctccgtcgcttcgagggctcctggctgctgcgcttccatgtccagggcgactatgtcggcctgttcagcgaagggctgctggccttcgaggaagacgggcggatccgcgcggtgaaccagagcgcgctgaacctgctcggttgtccgcgccagcgcctgctcggccagccggtggagaccttcttcgattgccgtctcgacgacctgctcggtcgcgcctcgccgcaacccagcgccagctggccgctgcgcacccgcgagggacggaccctgtacgccatgctgcgcggcgcgccgcgggcgataccccaggccctggcggtgcccacggcagcgaagccggcgcctgccgcgcccggcctgtgcctgggcgacgccgagctggccgccgatttccgccgggcgctgaaggtctacgcgcgcgacgtgccgctgctgctcaacggcgagaccggttccggcaaggaggccttcgccaaggccgtgcacctggccggcccgcgcgcggaacaggcgttcgtcgcgctgaactgcgcggcgatcccggaaaccctgatcgagagcgaactgttcggttatcgcggcggcagcttcaccggcgcgcgcaaggagggcatgcgcggcaagttgcagcaggccgacggcggcaccctgttcctcgacgagatcggcgacatgccgctggccttgcagacccgcctgctgcgggtgctggaagagcgccgggtagtaccgctgggcggcgagccggaggatgtcgacgtgcgcctgatcagcgctacccaccgcgacctggccgggctggtcgccgatggacgcttccgcgaggatctctactatcgcctcaatggcatggtcgtgagcctgccgccgctgcgcgagcgcagcgaccgcgaggagttgctggactacctgctggccgaggaagccaggggccagcgcatccagctcgacggcgaggttcgccagggcctgctggcctaccgctggccgggcaacgtccggcagatgcgcacggtgctgcggaccctggtggcactctgcgaggacggccgggtcggcctgcgcgacctgcccgcggatatccgccaggccctggcggcgctgccgcccgctgcagcggcgcccgccccggccgcgggcaacagcctggacgacgccgagcgagccgcgttgctggcggcgctggacggccagcgctggcacgtgagccgggtggccgagcaactggggatcagccgcaacaccctgtatcgcaagctgcgccggcacggcctggtgcgcggccaggcctgacgggcgggacggctccaggcgggccgccgcgaggccggcgggaaccccgccgacgccgcgtcgtctgatgccgcgacgccgggcggccggcgcctccgctgtgctaatctgccgcccattcacagcgccttcgacggcttgatctgcaggagtctgcatgcacatccacgtactcggcatctgcgggaccttcatgggctcgctggccgtgctggccaaggaactgggccaccgggtgaccggttccgacgccaacgtctaccccccccatgagcacccaactgcaagcccagggcatcgagttgatgcagggctacgatccggcccacctggagccggcgccggacctggtagtgatcggcaacgccctgtcgcgcggcaatccggcggtggagcatgtcctgaacaagggcctgccctacgtttccggcccgcagtggctggccgaccacgtgctgcaaggacgctgggtgctggcggtggccggtacccacggcaagaccaccaccaccagcatgctcgcctgggtcctggagcacgccggtatgagcccgggcttcctgatcggcggggtgccgcagaacttcggggtttcggcgcgcctgggcggtacgccgttcttcgtggtcgaggccgacgagtacgacagcgccttcttcgacaagcgctcgaagttcgtccattaccgcccgcgcacggcgatcctgaacaacctggaattcgaccacgcggatatcttccccgacctcgcggccatcgagcggcagttccaccatctggtgcgcaccgtgccgggcgagggcctgatcattcgtccgagcgccgagaaagccctggagcgcgtactcgggatgggctgctggaccccggtgcagaccaccggcgaaggcggccagtggcaggcgcgcctgctcgccgaggacggctcgcgcttcgaggtgctgttcgacggcatcgtccagggcgaggtggactggccgctgaccggcctgcacaacgtcgccaacgccctcgccagcctggcggcggcgcgccatgtcggtgtggtgcccagccagggcgcggtagcgctcagcgagttccgcaacgtcaagcggcgcatggagaaggtcgcggaggtccggggcgtgaccctctacgacgacttcgcccaccatccgaccgccatcgccaccaccctcgacggcctgcgcaagcaggttggcgccgatacccaggtgatcgccatcgtcgagccgcgttccaactcgatgaagctcggcgctcatcgcgacggcctgccggacagcgtgcgccaggccgaccaggtgctctggtacgcgccgccgaacctgggctgggacctggccgccaccgccgcgcaatgcgcgataccgtcgcaggtctgcgataccctggaggcgatcatcgagcaggtgcgccagcaggccaggcccggcgcgcaagtggtgatcatgagcaacggcggcttcggcggcttgcacggcaagctggccgcggcgctggccgagtgaggggcgcgatgagcggtccggaacgcattaccctggcgatgaccggcgcctccggcgcccagtacggcctgcgcttgctcgattgcctggtgcaggaagagcgcgaggtgcacttcctgatctccaaggccgcgcaactggtgatggccaccgagaccgacgtggccttgccggccaagccgcaggcgatgcaggccttcctcaccgaatattgcggtgccgccgccggacagatccgcgtgttcggccagaacgactggatggcgccgccggcctccggctccagcgcgcccaatgccatggtgatctgcccgtgttccaccggcaccctgtcggcggtcgccacgggggcctgcaacaacctcatcgagcgcgccgccgatgtcgccctgaaggagcgccggccgctggtgctggtgccgcgcgaggcgccgttctccagtatccacctggaaaacatgctcaagctgtccaacctcggcgcggtgatcctgccggcggcgccgggcttctaccaccagccgcaatcggtggaggacctggtggacttcgtcgtcgcgcgaatcctcaacaccctggggattccccaggacatgctgccgcgctggggggaacagcaccttgtcagcgacgagtagggtgctgctgctggtcctggcggtgcagatgggcggttgcgccaccgtgcgcaccctggatgcggccaagccaggggcgccggtggtctacgccggcacccggctggattggtacagcctgcacggcggctgctgcccgatggaacgcttcggcgcggaggcgccggcccatccggggctcgacctgccgggcagcgcgctgctggacaccctgttgctgccgttctcgctggccaccgccatcggcctcaacctcggcgtcagcggcggcatgtagggcgagacccgccccaggctcatttccccagcttgcgcagttcgtcggactcgacgaagcgcacgcccttgccttcctccagcgccaggcgccagagcgcgcgggccaggtcgcaggcctcgatgccgtggtatttgccgggaaggatgcgggcgatcggcgcagcgaggatctcggccaggcggaattcctcgcgcgggccgaacagcagcgatggccgggcgatggtcagttgtggccagccctgttcctgcagggcctgctccagttcgcccttgacccggttgtagaagatcgacgacttggcgtcggcgcccagggcgctgaccaccaggtaatgccgggcgcccatctccagcgcgcgcttgcccaccgccagcggcaggtcgaaatcgaccgcgcggaaggcctcctccgagccggcttccttgatcgtggtgccgaggcagcagaaggcggtatcgatgctgccgtcgagttgcggcagcagctcggccagcgggccgaccgggttgtccagccgcggatgctcggccagcgccttgcgggcaggggcgatgaccttggccagggtcggctcgctcaatatccgatccaacaggtgctcgccggtaagaccggtcgcgccggcgagcagaacgcgcttgggcgtcgagtgcatgtgtgtttctccccttccacaccaatgagcgtagtgcgcggcgtatctatttgcccgccgcgccctcgccggtttttccttcccggaacgcgagcgcgcgctcggcttgctgcccccgcagcgtccgccagtgcgcgagcacgcgttccggtaaccaggcttgcggttccgaagcttcgaaaccttcctccttctccctttgacgcacttcctctttcgccagttcgaacgctttggacagatcgtcggtgcggttcagcgcattggccagcaaggcgcggccgaaataggtgaagtcggcgtcgtcggaacagccgaacgagacccggtcggcacgcgcggcggtcaggatcagggtacgttcgtctttcagcggcgggatgaagcccccgctgtagcaggccgataccaccagcaccttgtcgcgctggcgcagcggcgcgagcagttcggccagttccgcggccggcaggtcgccgaggttcaggccgggcatgtccagggccaactggtggtcgctggagccgtggctggtcaggtagatgaagaccaggtcttccggcccgctgcgttcggccagggtgcgcacggcgcgggacaggctttcccgggtagccagcgggcggtcgccgaagtggtcgcggtggttgaccaggcgaatcacgccacgagcggcgaaacgctggccgagcaggtcgccggcgtaatcggcctcgcgcaggaacacgccctggcggccatcgccgcccaggctcagggcatagagttcgctggccggcgtcgaggccgggatcttgcgcagttcttcgtcgagcaggcgaccctgggccaacaggccgatttccagggtgtcgggcagggccttgccggcggcgtcgcggatgcgcttgccgtcggcccagagtccctgctcacggctgccgtcggcgcggtccagggtgccttggccggcataggcgccggcggcgaagccgccttcgtagcgggtgccgtccagttgttcgagcaggccctggccatggaagcgccagaactggaaaccgccgcggtagcggctgccgtcggcgccgagaagctcgccggggccgttcagcgcgccttcgctgaagcggccgatccagacatcgccgctggcgctttcgtagcgcccctggccatggaactggttgtccttgaactggccgacgtagcggtcgccatcgggcccgctccagcgccccttgccgttcagttgcccgtcgcggaaggtaccggcgtactggttgccctggctgtcgctgaagctgccttcgccttccaggcggccctggcggaagctgccctggtagcggctgccatcgctgccgtccagcgtgccctggccgctgtacaggcccttgcggaaaccgccgcggtagcgagtgccctgttgttccaggctgccttcgccatcgaacaggccctggcggaaaccgccctggtagacgctgccatcggccatcgccaggcgtccctgaccgtcgaacaggccggccgcgaagccaccgctgtagcggctgccgtcggcgccctgccaggtgccatggccgtgcagcaggccatgctcgaagcggccggcgtaccaggcgccgttgtcgtagtccagccggccctggccttccaggcgcccgtccaccagctcgccgcgatagcgcgcgccgtcaggcaggcgcgcatcggccgggagcagcggttcgccctcgccacaggcggcgagcaggatgaccagggcggagcagagcgagagagacctggcggggcgaagcatgcggcgttcccgatgagtggttcggtccgagggtggaggggagacagtgtggcggaaaaatcgttgcctggcagtagggtatttccctgccggcccagagcgcccccgcgagcgggggcttttggaaggggggagaggggcgcgaaggcgcctggccgtcaagcgaacggcagcgctcgctggggcgggctcagacgaagcagaggctgagggtctcggcgatgtaggcgggtttctcctggccttcgatctccagggtggcgcgcgccttgatcagccactggccgggattcttctcgttgacgtcgagcagggtcaggcccaggcggacccgcgagccgacccgcaccggctggatgaagcgcaccgtatcgaggccgtagttgaccgccatcttcagtccttcgggaagcaccagcaggccttccatcagcttcgggatcagcgacagggacaggaaaccgtgggcgatggtgccgccgaagggcgtcttcgccgccttctccggatcgacgtggatgaactggtggtcgccggtgcattcggcgaactggtcgacccgctcctggtcgatggtgagccattcggaatggccgagatccttgccgacatagtccttgagcgctgctacgggtacgaatggcataagtcctccgggaggatggctgttgttctcatggtgcaggaagatcagcacgcgttggcgaccgggtcaagaaaccatcggcctggcgaatatcgcgtcatgcggtgccgcgactgcgactgatggataggcgaggagcgtgccaatgtcccggcgggctgggcataatggtcggcccttgctggaggtgcccatgttgcttcgtggtctgacctggctggtgctgttccagttgctcggcacaggtctgaacgttctgttgttgcccatgctgcccggtccgatcatcggcctggtgctgctgttcggttatttcctggcgcgtggcgaggtcggcaagccggtcaacgaggcggccggctcgttgctgcgctacctgccgctgctgctggtgccggcggcggtcggggtgatggcctatgcgcgggagattgccgccgacttctgggccatcgtcggcgcgctggtactgtcgctggtgctgtcgttcctgttcgccggctggatgatgcagaagctcatcgatcgccagcaacgtcgccgggaggagtcctgatggcctggcaggccgccctcgaggcggtgatccaccatccgctgttcggcgtcggcgtgaccctgggcgcctaccagttggccctggccgcctatgaacggacccgctgggtgttcctgcagccggtgctggtatcgatgctggtggtgatcggcgtgctgctgctttgcggcatcgactacgacgaatacagtgccagcgccaaggtcctgaccattctcctcggccccgccacggtggccctggcggtgccgctgttcctcaacctgcggcgtatccgccaattgttctggccgaccctgctgaccctggtggtcgccggtacgctggcgacggtgctgggcatcgcattcggctggttgttcggtgccgagccgcggatgctgatgagcatggcgccgaagtcggtgacctcgccgatcgccatgctggtggccagccagatcggcggcgtggcggcgctggccgccgtgttcgtactgatcaccggggtactcggggcgatcctcgggccggagctgctgcgcgccatcggcgtccggcaccccgccgcgcagggcatggcgctgggcatgacggcccacgcggtaggcacttcgcgggccttgcaggaaggcgaggagtgcggcgccttcgccgccctggcgatgagcctgatgggcgttgccaccgcagtgctgctaccgttggcggtagcgctggttgcctgacgatgcccgaggagtcgcgatgaagttgccgttgtttcccctcaacgccgtgctgttccccggttgccgcctggacctgcagatcttcgaggcgcgctacctggacatgatcagccgctgcatgaagcagggcaccggtttcggcgtggtgaccatcggcgaagggcgggaggtcggcgaagcgccgagccgcctggcgatggtcggctgcgaggcctcggtccgcgactggcagcagcgcccgaacggcctgctgggcatccgcgtggagggcggtcggcgtttccaggtgctgtcggtggaggtccaggccgaccagctcagcgtcggcgagatcgagtggttcgaagacctgccggagcaacccctgacgtacgaacacaacgatctcgccgcgttgctcagcgtgctggccgagcatccgatggtggccgcgctggagatgggcggcgagcccggcggccagcaggacctggccaaccagttggcctacctgctgccgttcgataccgaacgcaagctcgaactgctcgccctgcccgacgcgcagatgcaactggcgcggatccaggtgctgctggagcacctgcagggcgagttgggtatcgactgagcgccaaccctcacagcggccggtagcgcgcaatggcttccggcagggcccagccggcggcgatcgccagggtcgccacgcagaccggcaacagcagccaccagacccgttgcggcagcgccggcagcgactcgcggcgctggctcagccacaggctggcggcgcagaccgtagtggcgagcagggcgccggcgacgatgtccgacggccagtgcacgccaaggtagacccgcgacagggcgatgctcagcgacgggatcaccgccagcagtacccaggtcaggcgccagcgcggcggttgctggcggctggcgaggacgcccagggtgaggaagaaggcgaaggacgccgagctgtgtccgctggggaagctgaagctgctcagcggttcggccagcacttccgggcgggcgcgggcgaacagggtcttcagggtctggttggccagcgcggtacccaccagggtgccgatggcgaagatggccggacgccattgccgggtcagcaggaggataccgccgagcagcgcgccggcgatgaactgggtgcggaaatcgccgagccgggtgaccaccaccatcaccgggttcaggtcggcgttgcgatgctcctggaccagcgtcatcaggccctggtcgaggtcctggaggtacggccaggcgacggtcatcgccagcagcaggaccaggctcagcgcggccgccacagcggttgcccagcgtttgcgccgcaggctggcctggactaccacgccgaccagcaccgccaggcaggccgcgacgatcccggcttcgctccagaagccttccggcaacggcaggcgcagggctgcgccggtggcccagccgggcaacaggtaggcgaccgcccagccggcggcggcgatcagcgaaacgccgagaaaacggccgaacggcatgtcgagcatgccggcgaccatcggcagcatcggtcgcagggcgccgatgaagcggccgaccagcaggctggcgataccgtagcgttcgaagtacacctcggcggcggtgatccactgcggatggctgcgcaggccgggcaggcggcggatgttctggtggaagcggcggccgatccagtacgagctgaggtcgcccagcaccccgccggcgtaggccagcagcagggtttcgccgaggccgagggcgccgctgccggcgatcaccgcgacgccgaacagcagcaccacgccggggaggacgataccgacgatggccgcgcattcgaggaaggcgatgaggaagatggccagccccagccactcggggttggcggccatccaggcgttgaagctgtcgagactcattgcaggtgcgggtcctgatgtccgagtagatgatagtcgcgcccggcgacctggccgcggcgcagtgggttgcgggtgcagaaggcggcgaaggtggcatcgacgaaacggtacggcaggtgttcgtcgcgccccttcggaatgcccagccgagcggcctggatcacctggctggggcgctcgccgacatcgtcgacgaacagtcgctgcgggtcgaagcgctgtgcgtcccactccggcaccttcagccccatggccttgcacagcagggtctggccggcgcacaggcggccgatctcgcggggccggccctggctgtccgggttcaggctctgcatccgctccagcgccgtgtggtcgctgatgcgatccagccagggatggccggacttgatcagcaccgcattgcccggcccgccggcgctgaagttcagcgagtcgccgccgcgcgcgtaatacatatagatgtgcccgccgtcgaggaacagtgccttgcgcttctcggtgtagccgagcgaggcatggctgcctttctcctccaggtagtaggcctcggtctcgatgattcgcgccgccagccagagattgccctggcgatggcggatcaccttgcccagcaactcgcgggcgaccagcaacgcatcgcggtcgaagaaggtgtcggggagcggccgggcgtcgggccagggcaaactaaggatgggatcgcgggacatgggattgtcgctgggaccatggcagtcataggctggcgaatgataacaacaagagcctgaatcatggttgaacgagagcgtgtcgacagtgcccacatcacgcccagcgcccattacaccgggtacgtctggttccgccatcgactcgccgaaccggccttcgccaccgtcttcggccgctgggtacacggcttcgtcgcgccgatcaactggggcgcgcagctcggtttcggactgaacatcgaggatttcctgttacaaagacacctcatgatcgacgcgcgcctgacccaggccgtcgaacgcgagggagtggtccaggtggtggaaatggcctgcgggctctcgccgcgtgggcgacgcttccggcaacgctatccacagttgcgctacctggaggccgacctgccgccgatggccgcgcgcaaggcggcgttgctccgcgagcaggggtggctgggcccggagcacgcggtggcggctgtggatatcctcgccgaggaaggcgagcgcagccttgccgcgctgttcgccgggctcgatcgcgagcgcccgctggtggtggtcaccgaggggttggtgaactatttccagcgcccggtgatcgaggccttctggagtcgcctggcgaccgaacttaaacgcttcccccagggcatctacctgaccgacctctatcccgatctccgcgagcacccgcgctaccggcagatccgctggggagtggggatcatcgggcggctgacgcggggaagctatccgttgcattaccgcaatgccgcggaaatcgaggctgccttcgcccgctgcggcttcgcctccaccctggtgctcgacccgcagcgcgaaggcgccgccctgggcttgccgcagggacgcctgccgagcctggtgcgggtaatcgaaagccgcacggcatagccgcctctcaggcgacctccgctcgctcccaggcggcgaggaggtcggccagtccggcgctggccgccggatcggagtgcgggaagatgaaggcgaagccgccggcggtcgagcgcaggggcaggatgtccaagtccgccaggccgtcgcagcacaaccgccagccgcgttgcgggcgggattcgggcagctcggcgtgcagccgcccgccgaaatagccgagttccatcagttccgccgcatagacgccgaactgcggatgttccagccgagcgtgcccttgggctggccgatggcggacctcgaagcgtcgctccaggccgagcaggcgcgtgcgcgggatccgcgtgctgccctcggcgcgctccggcagtgcctcgccgcgcaggaacgggccgtagagccgggcgcaggcctcgcgtcgttcgaactgggcaagatggtcggcgtcgtggatcagggcgaactcggcgttcccgcaggcatgggcgaacaccgcatgttcccagggctgggtgaaatggtcgtactcgccggcgagcaccagggtcgggcaggtcgggtgccgctcgaagccgccgaaggccagcaggcgccggctattctgccggtagcgttcgatctccgccgcggtcaggcgttgcaactggcgcagcatggccttgcgaaataccggggagacgccggtacgttccagctgtagcgggttgatcaggccggtcagtacgccgtgggcgaaggcgctctggtcgccctcgtcgagccgggccagggcttcttccagcagcagccgcgcaccggggcggccgaatgcggtgatgccggccagtagcaggcgcgcgcagcggcgcggatggcgggcggcgaacagcgcggccagggccgagccgtaggacaggccgatgggcatcaacggcggcaggccgagctgttcggcgaaggccgcgatcaggtcggcgaggtcttccaggctcagttccgccgccagttgcaggttgccgccctggctcggcaggtcgagcaggatcaccgggtgctcggcgagcagttcgctgacctcgccggtgaatgagcggaagctctggaaggcgccgcccagcaggagcaccggcgggcgcgggtcgtcggcgcgggcggcgaaggcctggtagcgcagttgccagccgtctaggaagaggatatccggttcgctgctcagcgactgcgcgctgtagtcggtacggtagcgcatggcgaggccccgcggtgtgtgcgtcgttattgttgttctgccgagcgggtgccggtgggtggcagtggccaggctcgcctcgaaggtaaacagaggtagcaattttgtttacctatccttcggccggcgcctgcgcccgggtgtcaccgtctcgcgcacagccccaggcgcagcggggctgccgcgttaccgccgggggcgatggaacgcactgtctaccgaccggctgttgcggctgggcgcgccggggctggctcgctataatcgcgcatttccctgacgccagatgccgagaccatgaccgagtccgtcctcgactatatgagccgccttggccgcgatgcccgcgccgcctcgcggttgctcgcgcgcgccgccaccgcgcagaagaaccgcgccctgctggccgcggccgatgcgctggacgccgcccgcgcggagttgtcccacgccaacgagcaggacctcgccgccggccgcgccaatggcctggagccggcgatgctggaccgcctggcgctgaccccggcgcgcatcgacgacatgatcgagggcctgcgccaggtcgccacgctgcccgacccgatcggcgagatccgcgacatgcgctatgtgccctcgggcatccagatcggcaagatgcgcgtgccgctgggcgtggtcgggatcatctacgagtcgcggccgaacgtgaccatcgacgccgccagcctgtgcctgaagtccggcaacgcgaccatcctgcgcggcggctccgaggcgatccactccaaccaggcgatcgcccgctgcatccagcagggcctggccgaggccggcctgccggccgccgccgtgcaggtggtggaaaccaccgaccgcgccgcggtcggcgcgctgatcagcatgcccgaatacgtcgacgtgatcgtcccgcgcggcggcaagggcctgatcgagcgcatcagccgcgaggccaaggtgccggtgatcaagcacctggacggcatctgccacgtctacatcgatgtcgccgccgacctggacaaggcgattcgcgtcgccgacaacgccaagacccagcgctacgcgccgtgcaacaccatggagacgctgctggtacatgccggcatcgccgagcgggtgctgccgccgctggccacgatctaccgcgagaagggcgtggaactgcgcggcgacgccgcgacccgtgcgctgctcggcgcagacgtgctggaggctaccgaggaggactggcgtaccgagtacaacgcgccgatcctgtcgatccgcatcgtcgacgggctggacgcggcgatcgagcacatcaacacctacggctcgcagcacaccgacgcgatcattaccgagaacttcagcgatgcgcggcgtttcctcgccgaagtggattccgcttcggtgatggtcaacgcctcgacccgcttcgccgacggcttcgagtacggcctcggtgccgagatcgggatttccaccgataagctgcacgcccgcggcccggtcggcctggaaggcctgaccagcgagaagtacgtcgtcttcggcgacggtcacgtgcgcacctgatgggcaaacgtatcggcctgttcggcggcactttcgaccccgtgcatatcggacatatgcgcagcgccgtggaaatggccgagcagttcgccctcgacgaactgcgcctgctgcccaatgcgcggccgccgcaccgggaaaccccgcaggtgtcggccgcgcagcggttggcgatggtcgagcgggcggtggcgggagtcgagcgattgacggtcgatccccgcgaactgaagcgcgacaagccgtcctacaccatcgacaccctggagtcggtgcgggcggagttggcggccgacgaccagttgttcatgctgatcggctgggatgccttctgcggcttgccgacgtggcaccgctgggaggcgttgctggatcactgccacatcgtcgtgttgcagcgtccggatgccgacagcgagccgccggagtcgctgcgcgacctgctggcggcgcggagcgtggccgacccgcaggccctgaaagggccgggcgggcagatcaccttcgtctggcagacgccgctggcggtgtccgccacccagatccgtgcgctgctgggtgccgggcgctccgtgcgtttcctggtgccggacgcagtattgaactacatcgaggcgcaccacctgtatcgtgcgccacactgataaagaaacagagaccgactcaatgcaaaccgaacaactcgtccaagtggccatcgatgccctggaagatctcaaggcccaggacatcgtgaccctcgatgtgcgggacaagaccagcgtcaccgactacatggtgatcgcctgcggcagttccagccgccaggtcaagtcgctggccgacaacgtcctgaccaaggccaaggaaaacggcgtcaagcccctgggcagcgaaggcctggagtccggcgaatgggcgctgctcgacctgggcgacgtggtggtccacgtgatgctcccggcgacccgccagttctacgacctggagcgcctgtggcagggcgccgagcagagccgcgcccagcaccagccggaagagtgacgccggcatgcggttgcgcctgatcgcggttggctcgcgcatgcctcgctgggtcgaggaaggctggcaggaatacgtcaagcgcctgccggccgagctgtccctcgaactggtggagatcccgctcaacacccgcggcaagaacgccgacgtggcgcgcctgatccgtcaggaaggcgaggccatgctggcgcgcgtgcagccgggggaacgggtggtgaccctggaggtcgaaggtcggccctggagcaccgagcaactggctcgcgaactggatcgctggcgtctcgacgcacgcaccgtgaatctcatggtcggcggcccggaagggctggcgccggaggtctgcgcgcgcggcgagcagcgctggtcgctgtcgccgttgacgctgccgcacccgttggtgcggatcctggtcggcgagcagatctaccgggcctggaccgtattgtccgggcacccctaccacaaatagtccccagtcccgatgccgcagccgatccacctgaaagaccacgagaaagacgcccgcctggtgcgtcggcgcgtcatcgtcggggcggtggcggtggtcttgctgaccctggtgctggtggcgcgcatgtaccacctgcaggtgacccagtacgagtaccattcgacgctgtcggagaacaaccgggtccatgtgcagccgatcccgccgacccgcgggatcatcttcgaccgcaacggcgtgatcatcgccgacaaccgaccgagcttcagcctgaccatcacccgcgaacgcaccgaggacctgcagaagaccctcgacacgctggtggagatcctcggcctgaccgaggacgaccgggccatcttcgagaagcgcatgaagcaggggcggcgtccgttcgagccggttcccatcatgttcgaactcaacgaggaacagatcgcccgcatcgcggtgaaccagttccgcctgccgggcgtcgacgtggcgacccagttcgtccgccactacccgctgaaggagcacttcgcccattcggtcgggtacgtcgggcggatcaacgagcaggaactgaagaacctcgacccgatcaactacagcggcacccaccatatcggcaagaccggcatcgagcgcttctacgagagcgagttgcacggcacggttggctacgaggaagtcgagaccaacgcccgcgggcgggtgctgcgggtgctcaagcgcaccgacccgattcccggcaaggacatcgtcctgagcatcgacagccgcctgcaggaggccgccgagaacgccctggccgggcggcggggcgccatcgtggcgatccagccgtccaccggcgacgtgctggcgatggtcagccagccgagctacgaccccaacctgttcgtcaccggcatcagcttcaaggcctatgccgagctgcgtgactccatcgaccggccgctgtacaaccgcgtcctgcgcgggctctatccgccgggctcgacggtgaagccggcggtggcgctggccggcctcgacgccggggtggtcacgccgacctcgcgggtcttcgaccccggctactaccagttgcccaactacgaccacaagtaccgtaactggaaccgctacggcgatggctgggtgagcctggagtcggcgatctaccggtccaacgacacctatttctacgacctcgcgcacaagctggggatcgaccgcctgcacgccttcatgagccgcttcggcttcggccagaaagtcgccctggacatgttcggcgaagccgacgggctgatgccctcgcgcgaatggaagcgcaagacccgccgccaggtctggtacccgggcgagaccctgatcctcggcatcggccagggctacatgcaggcgacgccgatccaactggcgcagatgaccgcgctgctggccaacaagggccactggatccgcccgcacctggccaagaccatcgacggccagccgccggtcgaccccgacccgatgcccgacatcgtgctgcgcgacccggccaactgggaccgcgtcgactacggcatgcagcaggtggtgcatggcgcccgcggcacggcgcgcaaggtcggcgccacctcggcctacctgatcgccggcaagagcggtaccgcccaggtggtggcgatcaagcagaacgagcgctacgaccgctccaagctgctcgagcggcaccgcgaccacgccctgttcgtcggcttcgcgccggccaacaacccgcagatcgcggtggcggtgatggtggagaacggcgagtccggctccggcgtcgccgccccggtggtcaagcaggtgatggacgcctggctgctcgacgagcacggcaagctcaaggccgaatacgcggaacccgtcgcgccgctcgcggcggcggtggccaagcccgaacccacggcagccgagccggaggcgcccgcccttgaacagtaacttcgaccgcaccctgtccaacgaagacgtgatgcgccggcgcgccagcctgctgcagcgcctgcacatcgacgggattctcctgctgctgttgctgatcctcggcgccaccggcctgttcgtcctctattcggcgagcggcaagagctgggacatgctgatgaagcaggccacctcgttcggcctgggactgggcatgatggtggtcatcgcccagatcgagccgcgcttcatggcccgctgggtgccgctgggctacctggtgggggtcgcgctgctggtggtggtcgacgtgatcggccacgacgccaagggggcgacgcgctggatcaacatccccggggtgatccgcttccagccctcggagttcatgaagctgctgatgccgatgacggtggcctggtacctgtccaagcgcaacctgccgccggggctcaagcacatggtgatcagcctggcgatcatcatcaccccgttcgtgctgatcctgaaacaacccgacctcggcaccgccatgctgatcctcgcttccggcggcttcgtgctgttcgtcggcggcctgcgctggcgctggatcgtcggcgcggtgtcggcggcggtgccgatcgccgtggcgatgtggttcttcatcatgcacgactaccagaaacagcgggtgctgaccttcctcgacccggaaagcgacccgctgggcaccggctggaacatcatccagtctaaggcggccatcggttccggcggggtattcggcaagggctggctgctgggcacccagtcgcacctggattttttgccggaaagccacaccgactttatcattgcggtcctcggcgaggagttcggcctggtcggcgtctgcctgctgctggtgctctacctgctgctgatcagtcgtggcctggtgatcaccgcccaggcgcagacgctctacggcaaactgctggccggtggcatcaccatgacgtttttcgtttatgtcttcgtgaatatcggtatggtgagcgggttgttgccggtggtgggggtaccgctgcctttcattagttatggcggaacttcgctggttaccctgttgtcagggttcggggttctgatgtcgatccatacccatcggaagtggatcgcccaggtttgagaccaagagtgaagaacgcaatgcaagtactgcgtacatgggcggccaggggcgtccaatgggtcggcgtagccggcgtcattggcctgtccggggcggcccaggcgggggactacgacggctcgccgcaagtggccgagttcgtcagcgaaatgacccgcgactacggcttcgccggagagcagctgatggggctgttccgcgacgtgaaccgcaagcagtcgatcctcgatgcgatctcgcgcccggccgagcgggtcaagcagtggaaggaataccggccgatcttcatcagcgacgcgcgcatcagtcgtggcgtcgacttctggaacaagcatgccgaagacctggcgcgggcggagaaggaatacggcgtgccggccgagatcatcgtctcgatcatcggcgtggaaaccttcttcggccgcaacaccggcagttaccgggtgatggacgcgctgtccaccctcggcttcgactacccgccgcgagccgacttcttccgcaaggagttgcgcgagttcctcctgctcgcccgcgaacagcaggtcgacccgctcagcctgaccggctcctacgccggcgccatgggcctgccgcaattcatgccgagcagcttccgcgcctacgcggtggacttcgacggcgatggccacatcaatatctggagcgacccgaccgacgccatcggtagcgtcgccagctacttcaagcagcacggctgggtcaccggcgagccggtggtctcggtggccgagatcaacgacgagagcgccgagagcgcggtgaccaggggcgtcgacccgaccatgagcctaggcgagctgcgtgcccgcggctggcgcacccacgatgcgctgcgcgacgaccagaaggtcacggcgatgcgtttcgtcggcgacaagggcatcgagtattgggtcggtttgccgaacttctacgtgatcacccgctataatcgcagcgccatgtatgccatggcggtttatcagctggcgggcgagattgcccgcgcgcgaggtgcccattgagcaagcgtgtccgctcctccctgatcctgcccgccgtctgcggcctcgggctggcggccgtgctgttgagcagttgctccagcaaggcgccccagcagccggccaggcaggcgggcatttccgggccgggcgactattcccgtccgcatcgcgacggcgccccctggtgggacgtcgacgtgtcgcggatccccgatgcggtgccgatgccgcacaacggttcggtgaaggccaacccctacaccgtgctgggcaagacctactacccgatgaacgatgcgcgggcctaccggatggtcggcaccgcgtcctggtacggcaccaagttccacggccaggccaccgccaacggcgagacctacgacctctacggcatgaccgccgcgcacaagaccctgccgttgccgagctatgtgcgggtgaccaacctggacaacggcaagagcgtgatcgtccgcgtcaacgaccgcggcccgttctattccgaccgggtcatcgacctgtccttcgccgcggcgaagaagctcggctatgccgagaccggcaccgcgcgggtcaaggtcgaaggcatcgacccggtgcagtggtgggcccagcgcggccggccggcaccgatggtcctggcgcagcccaagcaggcggtggcccaggccgctcccgccgcggcgcagacgcaggcggtggcgatggcccagccgatcgagacctacaccccgccgccggcgcagcacgcggccgccgtgctgccggtgcagatcgactcaaaaaaaaacgcttcattaccagccgatggcctgtatctccaggtgggcgccttcgccaacccggatgcggcggagctgctgaaggccaagctgagcggcgtgacggctgcgccggtgtttatcagctcggtcgtgcgcaaccagcagattctgcaccgggtgcggctgggaccgatcggttcggcggacgaggttagccgcacccaggacagcatccgcgtggccaaccttggccagccgacgctggtacgccccgactgagcgcctactcacgcagggaattcccgcaagggattgtttgaccattggtagaaccagagagacggatgaacatcaccactatcgcgaaacgcttgtcactgcttgtcctgttcatcgcccctacggctggctgggctgctgaatccatggttccggcgccgccgcaactggccgccaagtcgtacgtcctgatggacggcgagagcggccaggttctggtcgagaacaacggcgaccagcgcctgccgccggccagcctgaccaaactgatgaccgcctacatcgccaccaaggagatcgaggccggccgcatcggcgagaacgacctggtcaccgtcagcgaacatgcctggcgcaccggcggttcgcggatgttcatcaaggtcggcagccaggtctcggtgagcgacctgctgcatggcatcatcatccagtccggcaacgacgccagcgtcgccctggccgagcatatcgccggcagcgaagacgccttcgccgacatgatgaacaccaccgcgcagaagctgggcctgaccaactcccacttcatggacgccaccggcctgcccaacccggaccactattcctccgcccgcgacatggcggtgctggcccgcgcgatcatctacggcgagccgagccactacgcgatctacgcgcagaaggaattcctctggaacaacatcaagcagccgaaccgcaacctgctgctgtggcgcgacaagaccgtcgacggcctgaagaccggccacaccgacgaagccggctactgcctggtggcttccgcggtacgcgacggccagcgcatgatcgccgtggtgttcggcaccaacagcgagcaggcccgcgccgccgagacccagaagctgctgacctatggcttccgcttcttcgaaagccgcaacttctacaagaagggcaccgagctgaccaagggcctggtctggaagggttccgagcatgaagtgaaagccggcctcgccgaagacctgaccatgaccctgccgcgcggccagatgcagaagctgcaggccagcatggtcctggagccgcagctgatggcgccgatccagcagggccaggtgatcggcaaggtggaagtgaagctggacgacaaggtcatccgcagcgccgacctggtcgccctcaacgccgtcgaggagggtggtttcttccgccgcctgtgggatagcatccgcctgttcttctacggtttgttcaactgaccgaccggcgcccgcccgctcacgaggccagcgggcgcccgtccccgcggaccacgggtccgccgccgccatgaccgatacccctgacgttcaacccccgaaaatcgaattcccctgcgagcgttatccgatcaaggtgatcggcgacgccggcgaaggtttctccgacctggtcgtggaaatcatccagcgccacgcgccggatctcgacgtcgagaccctggtggtccgtgacagcagcaaggggcgcttcctctcggtgcaggtgctgatcaccgccaccgatgtcgaccaactgcaagccatccataacgacctgcgcgcgaccggacgcgtgcacatggtgctctgatgggactcgagctgggcttccgtgagctcggcgaggttccctacgaaccgacctggcatgccatgcagcgcttcgttgccgaacgcgacaaatcggtaatggacgaagcctggctgttgcagcaccctgcggtcttcacccaggggcaggccggcaaggcggagcatgtgctgttccccggcgacatcccggtgatccaggtggatcgcggcggccaggtgacctaccacggccccggccagttggtcacctacctgctgctcgatgtccgccgcctgggactgggcgtgcgcgagctggtcagccggatcgagcagagcctgatcggcctgctggcgtcctatgacgtgcaggccgtggccaagccggacgcgccgggtgtctacgtcgacggggcgaagatcgcctccctcggcctgcgcatccgcaacggctgttccttccatggcctggcgctgaacctggacatggacctgcgaccgttccaacgaatcaatccctgcggctacgccgggatgcccatgacccaactgcgcgacctggttgggccggtggattttgccgaggtgtgtacccgattgcgcgctgagctcgtctcacgccttggctacgctgaacagaagacccttacgggcgggatcgaactgacatgagcactgttgtggagaagtccggagaagccaagccgggcaaggtggaagtcggcgtgaagctgcgcggcgcggaaaaggtcgcgcggattccggtgaagatcattcccaccgaggaactgccgaagaaacccgactggatccgcgtgcgcatcccggtttcccccgaggtcgaccgcatcaagcaactgctgcgcaagcacaagctgcacagcgtctgcgaagaggcgtcctgcccgaacctgggcgagtgcttctccggcggcaccgcgaccttcatgatcatgggcgatatctgcacccgacgctgcccgttctgcgacgtcggtcatggccggccgaagccgctggacgtcgacgagccgaccaacctggccatcgccatcgccgacctgcggctgaagtacgtggtgatcacctcggtggaccgcgacgacctgcgcgacggcggcgcccagcacttcgccgactgcctgcgcgagatccgcaagctctcgccggggatccagctggaaaccctggtgcccgactatcgcggtcgcatggacatcgccctggagatcaccgccaacgagccgccggacgtgttcaaccataacctggagacggtaccgcgcctgtaccgctcctcgcggccgggctcggacttcgagtggtcgctggacctgctgcagaagttcaagcagatggttccgcacgtaccgaccaagtccgggctgatgctcggcctgggcgagaccgacgatgaggtcatcgaggtcatgcagcggatgcgcgagcacgacatcgacatgctgaccctcggccagtacctgcagccgtcgcgcaaccacctgccggtgcagcgcttcgtgcatccggacaccttcgcctggttcgccgaggaaggcgagaagatgggcttcaagaacgtcgcgtccggcccgctggtgcgttcgtcctaccatgccgaccagcaggcgcacggcaacaagatcggctgatcgacgccgcgccaatgcctccgacgccgcgtccctgcacagggacgcggcgtttttcgttgggcagccacgaagcctcttcggacgtaggacgaataaccgcttgcggttatccgccggcgcgtaggtgagtaccgtttgctctcatccctgtgcggtaacgaagcgactgcgctggccgagctgccgcaccgcctcgatcagggcatcggccgccaggctgggttggcgcgagaaggcgtagaaacgcgcctccggcagcgtcggaaaaccctgttccgggcccagttcgcgcagcccctcgcgcatctggctgcgcgccaccaccgtcacggcgaaaccggccagcgcggcggacaggcagccggccatgctggcgctctcgaacaccaggcgccagggtcgcgcagcggcgccgagggctgtaatcgccgcttcgcggtagacgcagggttcggggaacagcgccagcggcagcggttcgcccgcgggcagctcgatcgcggtcgccgcggcccagaccagcggttcctcccagagcagttcgccgtcgtctcctacccgccggcactgcttgccgaacaccacgtcggtgcgcccctgggcctgctggcggagcaggtcggtggtgataccgaccttgagttcgatggatgcttcggggtgccagcggcgaaagcgttgcaggacgcgtggcagccaggcgctggcgaagtcctccgaagcgccgatgcgcaggcggtcgcggatcggcgtgccgtgcagcctggcgcgggcctcgcgctccagctcgacgatgttgcgggcataggcgtagagcgtctcgcccgcctgggtcagctccaggcggcgagtggtgcggctgagcaggctgacgccggctgtctgttccaggcgcttgatatgcccgctgactgcggagggggtgagcgcgagattgtccgcggcgagggcgaaaccgccgctgtcgaccacttcgagaaaggtacgcaacaacacgatatccagggattgggaggtggggacggcaagctccatgaggtcttccattcatctcgtttcatgaatagtagacgctaactattcatgaatcacccttggcaagcgtcctaggatgtcccttctttctcttggagaggtccgatgagccgctatgccttcgtttccaccgatgtcctggatatcgcctacctggagtggaatccgcagggggcgcgcagcgccgtcttgttgcacggttggccggacagcccgcatacctggaaagacctggcggagtccctggcggacgccggctatcgggtgctggcaccagccctccggggattcgccccgacccgcttccgcgatgcgtctactccgcgcagcgggcaactggcggctctggcttgcgatctgctggcattcgtcgacagcctggcattgcaacgtcccctgctggtcggccatgactggggggctcgcgcggtggccagtgcctgcggactgcgcgagggcgtagcctcgcacctggtgatgctctcggtggggtacgccagcaacgatccgcagcaagttctttccctgccgcaggcccgtagcttctggtaccagtggttcatggctacgccacgcggagagcgcgcgctgcgcgaggagggcgaggcgttcgcccggcagatgtgggacacctggtcgccgccgggatggtatgccgagcgcgatttccaggaggccgcccaggccttctccgggccggactgggtggccgtggtgctgcactattaccggcatcgctggggcttcgtcgcggggaagccgcgctacggggcggcggaacagcgcttgctcccggcaccgcgcctggcgctgccgaccctggtgctgcacggcggcgcggatgcctgcacccaccccgacggctcccgcggacgcgagcactacttcagcgggcgttaccagcggctggtgctggagggcgtcggccattttccgcagcgcgaggcggccgcccaggtggcggacgctatcctgcggttctgcgcggatgactaggtcctggacgccgcagcggcggataacgcccatggcgttatccgccctacgaaccggtgtgccgcgagcggtcgcggcggacgtggggtcgtaagctccgccggcggccctatggcgtccgcaggcggtcgagcagcgccggggtcggatagccgtccgccggccagccgaactcctgctggcaggcgcggatcgccttgcgcgtattggcgccgatgatgccatccaccgcgcccggatcgtgtccgcgggcggccagttgccgttgcagctcgatgcgctgcgagcggctcagcggaacatcctccagcggccaggcgccgactatccggccgccgcccttgaagctgtcggcgagcaggccgacggccagggcgtaggcgctggagttgttgtacttgaggatggcgcggaagttgtgcagcaccaggaaggccgggccgcggtgcccggccggcagcagcagcgaggcctgttcgccggagagtccggagggcagggggccgccgttgacgccttgtacgcccatcccttgccattcgcccaggggcttgcggatggtgagttccgccagggaatagtcgaagcctgccggcaggcggacttcgaaaccccagggttgtccggcgatccagccggaggctttcaggtagttggcggtggaggccagggcgtcgccgggcgagccccagatgtcacgcttgccgtcgccgtcgaagtccacggcatactggttgtaggtggtcgggatgaactgggtctggcccatggcgccggcccaggagccgatcatgaaggaggccggaacgtcgccgtgctggagaatcttcagggcggcgagcaactgggcgtgggcgaattccgggcggcgtccttcataggcgagggtcgccagggagcggatcacgttcttgttgcccatgtgcgaaccgtagttgctctccatgccccagatcgccaccaccgcatccgcatccaccgcatagcgcgcgtcgacttcgccgaggatgcgcgcatgctgcgccaggcgcgcctggccctggcgaacgcgcagcggatcgagggcgccttccaggtacttccataccggtcgggtgaattccggctggctgcggtctgcttcgaccacggcgggatcgggctggacgctggcgaaggcgcgatcgaaggtctgcgcatcgattccaccggccagcgcctgttgacggaaggcgtcgcgccactgttcgaagctttgcccaggctgggcctcgttcggcgcgccagcgggcaccgaggcggccgggccggcgccggagaagggagccttggtctgctggggagcggcaggctggttgtattcgactgtcggattcttctgcgcgcacgcgctggagaggccaagccccatggcgacgacggtgctgcccagcagcccgctcaccttcagcagggcggatcgttcggggttacgcattgctctcctcagcagggtcctcgggacgggccaccttagcacgccggccaggacgcgtctgccgtcgttggacgcgccggcggggccccgggttcgccaatgtggttccatcggcgcggtggatatcgttcgccatatgttcggtcactgtcgggcggccaatggtttcgtccgtaccgctccgccgcctgtcgaagcctcgcggcgcacccgagtcgggatcggcgacgggtcgcgcggcatgctcgaggccttcgacttcttcttcctggccttcgttctgcgcgacatggctacccgcttcggcgtcggcatcgaacgcccgagcctggttcgtgcgctgcaatggccagagggttgccagtcggccgcgcgggatgtcgaggccgcggatcatgatggaggaaccattggcttttcgcccaacccgatggggccagggcttgcgcgccgacgatagtgtgcccatgggcggcaggctggcggtggggttggtcctgtcgacgggcttcgggcggggtaggcggggcgcgtgggtgaggagggcgttgcgggaggatggaccagcggctgtttcaggccgccataacgaaagaagcctcccagttacgggaggcttcgcggcggtagctgcctttgcctttcttcgcctgttcctggcggctgcggaacagtggctgggcgaccagggatttggccttgttcggccgcttgcttttctttgccatggcataggtcctcgaaggtgatcgggctggcgctcgccagcgcgcgcatcatctgcctgtcgccgcggattgtccagtgccggttgcgccttcaggctgccggcaggccgaggcgctggccggcgaggctcagggcgagaagcgagagaccgctccaggggctgccgggtgcctgtcccttgatctgcgcgtcgatcaactgggcatccctcagcatctggttccagcggctgctggagtggcgttgcagggcacgggtcagcagcggacggcgcttgtcccagaccggcggacgcgcctgggcgaaggctttctccagcgggatgccctggccgtattgctgggacaggccagccagcaggcggatctcgcgggccaggccccagaggatcaccggcggctcgatgccttcgccgcgcagtccttccaggatgcgcagggcgtgggccgcttcaccgccaagggcagcgtcgatcaggccgaagacatcgaagcgtgcgctgtcggcgaccgcggcctgtacggtggcggcgtcgatctggttgccctcggcgagcagcttgagcttttcgatttcctgggcggcggcgagcaggttgccttccacgcgcgcggcgatcagctccagggcctcggggctggcggacaggccggcctgggacaggcgctggcgaatccactgcggcaactggtggacgtcgaccggccagacctggatgaactgcgcggcgttgccatcgatcagggccttggcccacttggtcttctgcgtgctgccatcgagcttgggcagactgagcaggagcacggtgtcttccggcggccgttgcaggtattcctggagaatcgccgcgcctttgtcgccgggcttgccggagggcaggcgcagttcgatcaggcgcttctcggcgaacagcgacaggctggcgccggcctccagcagcaagccccaatcgaagttggcttcggcattgaatacctggcgctcgccgaagtcgcgctcgcggcaggcctggcgaatggcatcgcaggcttcctggcagagcagcggttcatcgccgctgacgacatagacgggcgccagggggccctggaggtgcttggcgagttgcgcgggagtcagcttcataggagaagacggggccggcgaaaccggccccggggcatcacggggtggggaactcgatcggcgactgctgcggctcggcggcgcggcgctggcgctccgcctcgtcggcggcgcgcagggcttcggcttccgccttggccttggcttctgcctggcgctgggcttcgtcgagttgcgccggggtcagcgcctggaggcgcatggacaactgctggatcaggtcgcgccgcatctcgctgcgcagctgcgcggcttcctggtcggaaccgatcaggttgttttcgtcgtgcacgtagaccttctgcacctgtacctggttgctcatcaggaccaggtcgttggcgccgacgatctcgtagttgatcgtgttggtcagctcgaactccgcgccgcgcgcggaaccggtgtagctgacggtgcgctgctggttgtcctcgcggaccagcaccaggtggtagggcgcgttgctggtgaccttcacgccgctgttttccagggtttccttcagttcgcgcacggtcgggccgtaggcgttgcgcgcggacacgtcgatttccttgagcgcgaattgcgcatcgcccaggccgcgcagttggaagccgcaggcggccagcagggtggtcataccgatcagcgcggcgctggtcaggatacgtttcatcaagcttccctcactcctgttgatcagcgcccccggatggccgggggcgtccaatggaatcgcgtatcagttggcgacgatgttgaccagtttgcccggtaccacgatgaccttgcggatgctcaggccttcggtgaaacgcagcacgttctcgttggcgcgcgcggcggcctcgacatcctcgcggctggcgctggcggccacgtcgatgtgtccgcgcagcttgccgttgacctgcaccaccagttgcagggtgtcctgcaccagtgcgctctcgtcgacgctcggccagcgcgcatcgatcaccgcttcggcatggccgagctggccccagagcacgtggcagatgtgcggagtgatgggcgccagcagcaggaccacggtttccaggccttcctggatcagggcgcggtcctgggcgtcctggttaggcgccttctccagcacgttcatcagggtcatcaccgcggcgatggcggtgttgaacttgtggtgctggccgacatcctggctggcctgcctgatcgccaggtggatggcgcggcggacctgcttctgcgcgtcgctcagggcggcgacgtccagcgcgccggggaggccggcgctgacgtgggcgtgagccaggcgccagacgcggcggaggaagcggttggcgccctcgacgccggcgtccgaccactccaggctcatgtccggcggcgaggcgaacatcatgaacaggcggcaggtatcggcaccgtactggtcgatcatcgattgcgggtcgacgccgttgttcttcgacttcgacatcttctcggtgccgccgatctcgaccggctggccgtcgctcttcagccgcgcgccgacgaccttggccttggcgtcacgctcgacctcgacgtcggccgggttgaaccagtccttgccgccgttggcggtggtccggtagtaggtatcggcgaccaccatgccctgggtcagcaggttcttgaacggttcgtcgctgccgaccaggccttcgtcgcgcatcagcttgtggaagaagcgcgcatagagcaggtgcaggatggcgtgctcgatgccgccgatgtactggtcgaccggcagccagtagtcggccgccttcctgtccagcatgccgccttcgaactgcgggcaggcgtagcgggcgaaataccaggacgactcgacgaaggtgtccatggtgtcggtttcgcgcttggccggctggccgcatttcgggcagttgcattcgtagaattccggcatcttcgccagcggcgaaccggagccgtccggtaccacgtcttccggcagcaccaccggcaactggtcggccggcaccgggacgtcgccgcaagcctcgcagtggatgatcgggatcgggcagccccagtagcgctggcggctgatgccccagtcgcgcaggcggaactgggtgcgcgcctggcccaggcccttggcctcgaggtcggcgccgatggcgtcgaaggcggcctggtagccgaggttgtcgtacttgccggagttgacggtgagcacggactcgtccttggcgccgtaccactccttccagacgctggactcgaagtcgttgtcgccctcgaccttggcgatcacctggcggatcggcaggccgtacttgttggcgaactcgaagtcgcgctcgtcatggccgggcaccgccatcaccgcgccttcgccgtagttcatcagcacgtagttggcgacccataccggcagcttgtcgccggtcagcgggtgttcgacgaacagggaagtggccatgcctttcttctcctgggtggcgatgtcggcctcggcgacgccgccgcgcttgcattcgtcgatgaacgcctgcaactgcgggtcgttctgcgctgcctgggtggccagcgggtgttcggcggcgacggcgacgtaggtggcgcccatcagggtgtccggacgggtggtgaacaccttcagttggccggcgtggccgatggaggcctggtcgtaggggaagccgatctccatcccgcgcgacttgccgatccagttgcgctgcatggtcttcacctgctccggccagccgggcaggttgtcgaggctctccagcagttcctcggcgtaggcggtgatcttgaagtagtacatcgggatctcgcgcttctcgatcagcgcgccggagcgccagccgcgcccgtcgatcacctgctcgttggcgagtacggtctggtcgaccggatcccaattgaccgtgccgttcttgcggtagatcacccctttttcgaacaggcgggtgaacagccactgctcccagcggtagtagtccggcttgcaggtggtgacctcgcggctccagtcgatcgccaggccgaggctgtccaactgcgacttcatgtaggcgatgttgtcgtaggtccaggccgccggggcgacgttgttcttcatcgcggcgttttccgccggcatgccgaacgcgtcccagcccatcggctgcagcacgttgcggccctgcatgcggtggtagcggctgatcacgtcgccgatggtgtagttgcgcacgtggcccatgtgcagcttgccgctcggatacgggaacatcgacaggcagtagaacttctccttgtcgggtagctccctgacgaggaaggactggtgttctttccagtagttctgggcctgggtttcgatctcgagtggctgatattgctcgtgcatggcgctacttagacgtgactgttcgaaagcctcgtagcatacatgacccccactcctgtcgatagcccgcgccgtttgtcgccgggggcggttcagccgaacgggaacgctaagcttgccctatgggccgtcgatggctggctgcccagtggtaccttcagaggtgttcgatggctgagctgcaacgcgcgagtgtgacgggaggtgggctgtacgagaggctgctgcagcgtctcgccctggctctggatgaagcggatacggccgagcgcctgcgtgacgagcatcccacggagcttgagttgcgtggtttgagcgaagcggagatggggctgatacgcgcctatctcgaccaggacctgcactggttgcgcggctggcatgcggccgccgaggagctggcgctgctcgagcgccagcccggcaggacaccccggccgccccggccgcaaccgccggcgccccgtcgccacgtctcgttgaaacagcggcaactgctctgtgcgctctgcggtgcgccggtgcagtggagcaaggggcatggcgtgttgccgtgcggccattgcggctcgcaactgttccgttcgggcaacggccgctagggtctctttccgggaagtttcgccaggcgtcgcgcaatcctttagattgcctcttccgacagggagggggcgatgccgatccgttatttcttcaagcaacttctgctgccgccgggcggcctgttgctgctgctgtttttcgctttctggtggcgcaccagccgaccgaggctggcgcggctgtgcggtgtctgcgggttcttcggtctgtggctgatgagcatgccgctcagcgtggagtggatggcgcgctggctcgaaagcgaaccggccctgctggcggaggatctgccgggcctggcgcagcgcgccgacgccatcgtcatcctcggtgccggccggcagaccaacgacccggcctggggcgacgatgcgccgagcctgctggcggccgagcggctgcgctatgccgcgcggctggccaagacctcggcgctgccggtactgatcagcggcgggttgcattacggacgcccgcccagcgaggcggcgctgatggccaatgccctgttgcaggacttcggcgtgccgacgcgctggcaggaaggtctcagccgtaccacctgggaaaacgccaccctgagcgccccgcagttgcgcgaggccggcgtgcgccgggtggtgctggtgacccaggcctggcacatgcagcgggcacgctggagcttcgagcgccaggggttcgaggtgatcccggcgccggtcggcttcctcggcggggccaacctgcggcccttcggcggctggctgccggaagcgcaggccttctggcagagcggcatgctgctgaacgaggcgatcggcctggtcggctatcgcctgttctaccgctgagacgcaaccggcgccgcaggggcgccggtctttccaggaggggctggtttcagccgaacaggcgtcgctcctgcggacgcaactggcggccgagcagagcccatagcagcagcacgccggccaacccggccagcggccagacgcggtattgcagatagggcgtcaggccctgcatgggaatcacctcgccgcgcaggatgccctgctggaactgcgggatctgccggacgatccggccatagggatcgatcaggccggtgacgccgttgttggtcgcgcggatcatccagcgaccgctttccagggcgcgcatctgtgccatctgcaggtgctgcaaagggcctatggaagtgccgaaccaggtgtcgttgctcactgtcagcaacacctggctctgcgccgcgagcgcggcggcgaactccgggtagaccacttcgtagcagatgtacggggcgatctggtagcccttggccttgagcagcggctggtcggccggaccgcgagcgaagtcggacatcggcaggtcgaagaaggcgatcaggccgcgcagcaggtcctgcagcggcacgtactcgccgaacggcaccagcttctgcttgaggtaggtgcccgcgccttcgccgaccacggtgatgccgttgaagtagcgactcttgccgtcggcgagacgttcacgcaccgggaccccggtgatcagcgcggcgttcttctcgtcggcgacctggcccatggcgccgaggtagccgctggccatgtcctggagaatcggcaccgcggtttccggccagacgatcaggtcgacgtcctgctgcggcaggctcaggtcgcggtagaggtcgagttgcgcgcggacctgattcgggtcccatttcagctcctgggcgatgttgccctggatcgccactaccctcagcggttcgccggccgaatgggtccaggcgtggcccttgagatagaggccggccgcccacgggccgagcagcaggaccagccccagaagcaggctggcaccgtgcgggaagaggcgcggcaggttcaccagcagggccgcgctgagggcgatgacgaaggaggacagccatacgccgcccaccggtaccagcccggccagcggtccctgcaactggctatagccggcgtagagccaggggaaaccggtaaggaaccaactgcggaacagctccagtgccagccacagggcggcgaacgccagggcgtcgcccagcggcgcgttgtcgcggcgcaggcagcgcgcccacagccaggccggcagggcgaagaagaaggcgacgccggcggtgaagccgagcatgaggaagcttgccagcggcaccgaggcggcgccgtagtcatggatactgacgtagatccagctggtgccggcgccgaacgcgccgaaaccgtaccaccagccgcgccacagggcggacttgccgggaaggccgcgcaagccgagatagagcagggcgatcgagaggatcgccagcggccagtagtcgaagggcgccagggccaggggtgtgagcgcgcctgcggcgagtgccagcaggtgtccgggccagccgggacgagaaatccaacgcatcgaatgtccttagagcctgttcaatgtccgactgcgcagaccggggccgccttcggctgccggacggcaacgtccgcggcgacaggggagtctggcgcaaggcgcaagagtaaaggaggggctggcgagacgccagaaggacggcgcgggaagatgccccctccgccgcggcggagggggcgcgctcagttctgcaggggagacaggcgcagcagatggacgcggcggctgtcggcgttgagtacgcggaaacggaactcgcccagctcgaccacttcgttgcgcttgggcaggtggccgaaggcgctcatcaccaggccgcccacggtatcgaattcctcgtcagagaattccgagccgaagaagtcgttgaaggcgtccacgggggtcagcgccttgacgatgaaatcgccgctgggcagcggcttgatgtagctgtcctcctcgacgtcgtgctcgtcctcgatatcaccgacgatctgttccagcacgtcctcgatggtcaccaggccggccacgccgccgtattcgtcgatgacgatagccatgtggttgcggttggcgcggaattcgcggagcagcacgttgaggcgcttggattcggggacgaaggtagccggacgcagcagttccttgatgtcgaagggacgctcgtcgttgtgcaggatcagtggcaggaggtccttggccagcagtacgcccatgacgtcgtcgaggctttcgccgaccaccgggtagcgcgagtgggcggcttcgatgatggccggaaggaattccttcggcgtctgggtcgagcggatgctcatcatctgcgagcgcggcaccatgatgtcgcgcacctgcaggtcggcgacctggatcgccccctcgacgatggacagcgcctcgctgtccagcagcttgttgtcgtgggcatcgcgcagcagctcgaggagctcctggcggtttctcggctcgtgggcaaaagcctgggtgatcttgtccagccaggacttgtgcccgttgctcgatcggtcttcgctcatttttccttgctcggtggctcttcgtcgtcgcaggcgtacggatcgggatgacccagttccgccagcaattcacgttccagtgtttccatttcttccgcttcggcgtcgtcgatgtggtcgtagccgagcaggtgcaggcagccgtggatcaccaggtgggcccagtgggcctgcaacggcttgcgctgttccagggcttcgcgggcgaccaccggggcgcagatcaccaggtcgccgagcagcgggatatcgagaagctcgtccgggacatcggcggggaaggacagcacgttggtcgcgtagtccttgtgccggtaggtgctgttcagttccaggccttcggcctcgtccaccaggcggatggtcagctccgactccggacgctggcgcaaggccagttcgcaccaggcgcggaactgtgcttcggagggcaggtccggggcggcgctggcgacctgcaggtcgagctcaagcggcatcgtgaccgcccttgcccgttccctcgaccggccgcacctggccttgctggcggttctcatggcgctcgtaggcttcgacgatacgctgcaccagcgggtggcggaccacatccttgggcttgaagtgggtgaagctgatgccggggacgtcctgcaggacctcgatcacgtgcttgaggccggagcgggtgccgcggggcaggtcgacctgggtgacgtcgccggtgatcaccgcggtggagccgaagccgatccgggtgaggaacatcttcatctgctcgactgtggtgttctggctctcgtcgaggatgatgaagctgttgttcagcgtgcgcccgcgcatgtaggccagcggcgcgacctcgatgacgttgcgctcgatcagcttggccacgtgttcgaagccgagcatctcgtagagcgcgtcgtagagcgggcgcaggtaggggtcgatcttctgcgacagatcgccgggaaggaaaccgagcttctcgccggcctcgaccgccgggcgcaccagcaggatgcggcggatctgctcgcgctccagggcgtcgacggcgcaggccacggcgagataggtcttgccggtgccggccgggccgatgccgaagttgatgtcgtggtcgaggatcgccttgacgtagcgctgctggttggcgccgcgcgggcggatgtgcgccttgcgcgatttcagggtgacctgcggcgcgctctgcaattcctcgaggtcttccaggccggactcctgcaggtacaggtgcacggtgtcgggagtgagatcggtgccgttctgcgcctcgcggtagagacgctgcagcaggcgttcggcaaccttggtccggcgcggttcgccggccagttcgaactggttgccgcggttgcggatctcgacgtcgaggcgtttctcgatctggtggagatgctcgtcgaactgcccgcaaagtgtcgcgaagctgcgggcgtcgaacggctcgaggataaagcgatgaagttcctggggggcgttcaaggtgttctgtcgtactcgccagtggctgattgatagagaagagaataaccgctggatatcgtcgcgcaaagttgccgtatcgcggcggcgctttcccggttcccgctgaaacgttggtgcaccgtggcggcgggaaggttcagcgagcccgccgtacggtcgtcggcctcaatgcagggtgctgtcgatcagggtgccgcgcagcgagtgcggcagcgcgtcgtcgatgtgcacctgggcgaactggccgatcaggcgcggattgtcgcagcggaagttgacgatccggttgttctcggtgcgcccctggagcatgcccgggtccttcttcgagaagtcggtgaccaggatccgctgggtgctgccgaccatgcgccggctgatctcgtagccttgctggtggatgcggctctggaggatctgcaggcgctgtttcttcacttcttccggcaggtcgtcggcgaggtcggcggcgggcgtgccgggccgcgcgctgtagatgaaggagaaggagaaatcgaagccgacgtcctccaccagcttcatggtctgctcgaagtccttctcggtttcgccggggaaaccgacgatgaagtcggagctgatgcagatgtccggtaccgcggccttcagcttgcggatacgcgacttgtattccagcacggtatggttgcgcttcatcgccgccagcacgcggtcggagcccgactgcaccggcaggtggatgaatttcaccagctccggcacctcggcgtgggcctggatcagcgcgtcggagaattccagcgggtgcgaggtggtatagcggatgcgctcgataccgtcgacggcggcgaccacccgcagcagttcggcgaagtcggccaggcggccatcgtgggtcaggccgcggaagccgttgacgttctgtcccagcagggtgacttcgcggacgccgttctcggccaggtggatcacttcggcgatcacgtcgtcgaatggtcggctgacttcctcgccgcgggtgtagggcaccacgcagaagctgcagtacttgctgcagccttccatcaccgagacgaaggcggtggggccatcgacccgcggttccggcaggcggtcgaatttctcgatttccgggaaggacacgtcgacctgcggcttgcgcgtgctgcgcgcggcgtcgatcatttccggcaggcggtgcagggtctgcgggccgaagaccacgtcgacatagggcgcgcgctcacggatcgcggcgccttcctggctggccacgcagccgccgacgccgatcaccaggtcgggattctgctgcttcagctcgcgccacatgccgagcttggaaaacaccttttcctgggccttctcgcggatcgagcaggtattgagcaggatgacgtcggcctcggcggcgttttcggtcacctcgagggcttggtgttcaccgagcaggtccgccattcgcgacgagtcgtactcgttcatctggcagccgtgggtttcgatgaaaagcttcttggccatgcgcttcgtcggacagttcgaaaaggaccgcgcattatagagggcggggcccccggttcctagcgttgctggccgaaaggctgtgctatgattcgcgcccttcattttccggcattgctttccccgccatgaacaagcgcgaaaaccccatctacaaggtgattttcctcaaccagggccaggtcttcgagatgtatgccaagcagatctaccagagcgatctgtggggcttcctggaaatcgaggagttcgtcttcggcgagcgcacccaggtggtggtggaccccagcgaggagaagctcaaggcgcagttcgaaggcgttctgcgcagcttcgtgccgatgcacgcgatcgtccgcatcgacgaggtcgagcgcctgggtacgccgaagatcagcgaggccaagggcgcaggcaacgtcatgccgttccccatgccgatgcccggcaagagcgactgattcgcgaaagggacgtcagggcagcggcgcgaagggcgtgacgccgccggcagtctgcagttcgatcaggtagttgcggaagatctgccccagcacccgggtggcgatgtccagttcgtcgcggttcatctgctcggctaccaggtcggcgctgtccagggcgtcctcggcgccgttcaccgctgccatcttcagcacgatgtaggcctgtacgttgttcgccggaaccccttcgccacggaagaacatggtgccgaggtggtactgggcctgggcatggccctgtagcgaggctttctcgaaccagttgagggcggcctggaggtcgcgcgggatgcgctcgccgtcgtagaagaattcgcccagttcgtattgcgcctcggcgtcgccgccattggcgacctgctggcaggcggcgagcgcctgctgcaattcttcgggaacggtgttcagcgcgcagcggccggtcgctggaatcagcaacgagttgcctcccgcctgcgcgagcagcggctggaggatcaacaggcaacccagggcgagggtgcggccggtacggaacatgaggggaagacacctcctggatcggggcgggcaagggctgcccggccaacgaaatgcgctgaccctcacattatgaaataagccgacgcctccttacaaagtctttactgtcttttcgggaactttgtcggcgcgtttatgcatttcggctaggaaggcgttccggcggggaggagggcggcgcccgggaagggcgccgcgaagaggatcatttcagcgcggcgaaggctttttcggcggcgttcagcgtgatttccagctccttgtcgccatgggcgatggaggtgaagccggcctcgaaggcgctaggcgcaaggtacacgccaccgtcgagcatcaggtggaagaagcgcttgaagcgttcgacgtcgctggccatcacgtcctcgaaggtgacgatggcgtcggcgctgctgaagtacaggccgaacatgccgcccgcctgggtggtgacgaaggggatgccggcggcatccgcgcgctgttgcaggccgtcgagcatgcgcgtggtgtaggcggtcagttcgtcgtggaaaccggggcggctgatcaggcgcagggtggtcaggccggcggccatcgccagcgggttgcccgagagcgtgccggcctggtagaccgggcccagcggggaaatctgctgcatgatctcgcgcttgccgccgaaggcgcccaccggcatgccgccgccgatgatcttgccgaaggtcgacaggtccggggtgaccccgtagtaggcctgggcgccgccgagggcgacacggaagccggtcatcacttcgtcgaagatcagcaccacgccgtgttcgtcgcaggcttcgcgcaggccttcgaggaagcccggcgccggcggcacacagttcatgttgccggcaaccggctcgacgatgatgcaggcgacctccttgccgacttcgcccagggtcttgcgcaccgcctcgatgtcgttgaacggcagggtcagggtgtgcttggcgaaggccgccggaacgcccggggagttcggcacgccgaaggtcagggcgccggagccggccttcaccagcaggctgtcggagtgaccgtggtagcagccttcgaacttgatgatgctgtcgcgcccggtgtagccgcgggccaggcggatggcgctcatggtcgcctcggtgccggagctgaccatgcgcaccatctccatcgacggcaccatggagcagaccaggtcggccatttccacttccagcgcggtcggcgcgccataggacaggccgtggtcgagttgccggcgcaccgcgtcgagcacgtccggatggctgtggccgaggatcatcgggccccaggagccgacatagtccacgtagcgcttgtcgtcctcgtccagtacataggcgccttcggcgtgcttgaagaacagcggggtgccgccgacgctcttgaaggcgcgcaccggggagttgaccccgccgggaatgtgtttctgggcgttgttgaacagcgtttcggaacgggacatggctagctctctatctctcgggcgaggcgcggaggcgtcaggcaggttcgaacagggcgctgaaggcgcgggcgcggcgttccacctcggcggcggacgcggcggcgaacagcgcatggatcacggcgaccagatcgacgccgcgggcgatcaggccgggcgcggtgtcgaggctgatgccgccgatggcggtgatcggcaggtgcaggcgcggccgggcctggtcgagcagttcgacgctggcggcgggggcgccgggtttggtgctggaattgaagaagcggccgaaggcgacgtagctggcgccctcggccaccgcttgctcggccagttccagttgggcgtggcaggtggcgccgatgatcgcctggcggccgagcagggcgcgcgccgccgacagcgaaccgtcggtctggccgaggtgcaggccgacgcccaggcgcgcggcgagttcggcgtcgtcgttgacgatcaactgcgcgccgtggcgttcgcagagttcgcgcaggctttccgcctcgcgcaggcgccgcgcctggtcgctggatttgtcgcggtattgcagcaggcgcgcgccgccgcggagcgcggcttcgacgtagggcagcaggcggccgtcgtccagtagctggctatcggtgatggcgtacaggccgcgcagtttcatcggctggctctcagtgacagaagtcggtgggcaggcggcgcggcacgtattggccgtggcccggactctcggcgtcgcgcagggtccgccaggtgtagtcgagggcgctctgcacggcgccgtgcagcgcttcgccgagggcgatgcgaccggccagggcgctggccagggtgcagccggagccatggtagctgccgggcaggcgctggcaggtgaaggtgcggcggctgccgtcgcggctgtacaggcgattgtgcacttcgctttcgtcgccgtgtccgccggtgatcaacaggtgctcgcagtgttccagcaggcgctcggcgcactggtcggcgctgccctcgggcaggtcggcgagcaggcgcgcttccggcaggttcggcgtggcgatggtggcgcgcggcagcagccgctcgcgcatggcgaagccgacgtcgcccttgcccaacgcaccgccgccgccggcgcgcagcaccggatcgcagaccaccggcaagtgcgggtgggcggcgaggatctcggccaccgtgtcgaccatctccagcgaaccgagcatacccagcttgaccgccgcgacgggcaggtcggcgagtacggcgttggcctgggccagcacccactcgcggtcgaggacgcggaagtcgctgacgttgacggtgtcctgcacggtcagcgcggtgaccgccggggcggcgtggcagccctgggcgagcagggcttcgatgtcggcttgcagtccggcgccaccactggggtcgtgaccggacaggcagagcactacggggcgggaagtcggtgttttcatggcgcgtgagcttaccactaaaagcgcttcgtggcggctgcgcggacgacctttcgggcgccgcgcccgggccctgcgtgacacgtcccgggcctgacgtggcgtggcgtgtgctaaagttcggcgaatattcatacaacgctcgccaagggcggaccatgacgagggaggtggggctcccggtccgttcgaggagcactgcggggcatcatgcggcactggctgattctctttcttcttgcgttgccgtgcctggcgggtgcggtgagcttcaacgagcaggtcgagcgcctgccgctggggcagtccatcgacgtgttcgaggacgtgcgcggtagcgccgatatcaacgacatcacctcgcgggccatcgacagcagcttccgccgccatgacaaggacgtgctcaatgccggctattcgcgctcggtgttctggttgcgcctggacctggactaccggccggtcgcctccagcgatccgcgcacctggctgctggagctggcctatccgccgctggacaagctcgacctctacctgcccgatggccagggcggctaccgcctcgcccagcgcaccggcgacacattgccgttcgccagtcggccgatccggcagaacaactacctgttcgaactcggcctcgagccgaacaagccacagcgtgtctacctgcggctggaaagccagggatcgatccaggcgccgttgaccctgtggtcgcccaaggcctacctggaggagcagcccgaacgcatctatgtgctcggcatcatctatggcgtgctgctggtgatgctgatctacaacctgttcatcttcctcagcgtccgcgataccagctatctctactacatcctctatatcgcttcgttcgggctctaccaggtctcggtgaacggtgccggcatcgagtacttctggcccgacagcccctggtgggcgaacgccgccacgccattcctgatcggttcggcggcgctgttcggctgccagttcgcgcgcagcttcctgcatacccgcgaccacagcgtgtgggtcgaccgcggcctgctggcgctgatggcggtcggcgcgctggtcatgctgatggcgctgaccatgagctacgccgtggccctgcgcctggccacctacctggcgctggccttcaccggcctgatcttcgccgccggcatcctcgcctggctgcgcggcatgcgcgtggcgcgctatttcatcatcgcctggaccgccttccttctcggcggcatcgtcaacaccctgatggtcctcggctacctgccgaacatgttcctcaccatgtatgccagccagatcggttcggcgctggaggtgggcttgctgtcgctggcactggccgaccggatcaacgcaatgaaggaggagcgcgcgcgaatcctccaggagtccagccgcaagctggaagcgctgaaccaggaactggccaacagcaaccgcctgaaggacgagttcctcgccaccgtcacccacgaactgcgcaccccgatgagcggggtgatcggttcgctggagctgatgcagacggtgccgatggacgtcgaactcgccgagtaccagcgcaccgccgccggttcggcgcgggacatgatgcggatggtcaacgacatcctcgccctcatcgaactgcaggccggcaagctctacccgcgccgcgagccgttcagcctgcgcggcctgttcgacagcctgcgcgcgcagtacgcgccgcgcgccgaggagaagggcctgcgcttcgccctgcaactggacgacagcctgccggacaccctcgaaggcgatgccggcaagctggcccaggcgctgggctacctggtcgacaacgcgatcaagttcaccgccaggggcagcgtgaccctgcgcgtcgccgccgggcgtacccatgacggggtggcgctgcgggtggaagtgatcgacaccggcatcggtttcgacatggccgccggcagcgacctctaccagcgtttcgtccaggccgacagctcgttgacccgtggctacggaggcctcggcatcggcctggctctgtgccgcaagctggtggagctgcttggcggcgagctgacccacgagtcccggccgggacagggcagccgcttcctcctgcgcctgcaactgacccagccggcccagggcatggcgccgccgccgcggcgcgccggcgggcaggcggtgcggcgtcccgaggagtgcacggtgctggtggtggaggacaacgccatcaaccagttggtgactcgcggcatgctgctcaagctcggctaccgggtgcgcaccgccgacaacggcagcgaggccctggagttgctggcgcgcgagcggccggacggtgtactgctcgactgccagatgccggtgatggacggcttcgccacctgtcgggcgatccgcgcgctgcccggctgcgcggaactgccggtgctggcgttgaccgcccacagccacagcggcgatcgcgagcgctgcctggcggcgggcatgagcgactacatggccaagccggtcaagttcgaagagttgcagaccctgctgcacgattggctgctgtgccagccgatcgtcaccaagtccgcctgaagcctttccgcggctggctgaaatgccggcctgcgcgacctgtatgtctctttaggcaaagcctgaagcgtgattcactgggaaaaagtgaatccggattcagtcatggtctatcgtgtcaccgaacgccgcctgcaacgcgattccgcgctgcgcgagcgcatcctccagctaggcctgcggcgtgtcgcggagggcggtttcgccgcgctgaccatgcaggccctggccgacgacgcggggatcgccaccggcagcctgtaccgccacttccggggcaagggcgagctggcggcggaaatcttccgccgcgccagccagcgtgaggtcgatgccctggccgtggtcctgcgcggtcccggcgcgcccgcctggcgcctggccgagggcttgcggcgctttgccgcgcgcgcctggagcagccagcggctggccttcgccctgatcgccgagccggtggatcctgaagtcgacgagcagcgcctgcgctatcgcgaggcctacgccgcactgttcgtcgaactgctcgaggagggccggcgcagtggcgcattccagctttccctggtgccgcttgccgcggcctgcctggtcggggccatcgccgaggcgctggtcggccccttgtctcccccggcgcgcgccgctcgcgacagcggccagccggaaccgagtctggagccggtgagtacggctctggtgaacttctgcctgcgcgcggtgggcgcgcctgtctgcgaggaaccctcatgaacctgcaccagtacgccgaaacccacgaagtgaccaaccaggtaccgtcgctggatggcgccaacctctaccgcctcgacctgcctctccaggagtgggtgcgtcgctaccagggcggctgggccgaggagcgcctgcagcgctacggcgagctggccggcggcccgctgatggcggccggcttcctggccaaccagcacaagccggagttccatagccacgaccgctacggcaaccgcgtcgacctggtggagttccaccccgcctaccacgagctgatgcgcgccgccatcgaacacgaactgccctcgctgccctggaccgacccgcgccccggcgcccaggtggcgcgggccgggctgtcctacctgcacagccaggcggaggccggcaccggttgcccgttgaccatgacctacgccagcgtgccggcgattcgcctgcaggcggacctggccgagaaatggctgccgaagatcctctcccgcgagtacgacccgcgcaacgtgccgatggagcagaaggcgggcgtcaccatcggcatggcgatgaccgagaagcagggcggcaccgacgtacgcgccaataccacgcgggcctacccggtggggattcccgggccggggcaggcctacgaactggtcgggcacaagtggttctgctcggcgccgatgtgcgacgccttcctcaccctggcctacaccgacaagggcctgacctgcttcctgctgccgcgccaccggccggacggcagccgcaaccagctctacatccagcgcctgaaggacaagctgggcaactggtcgaacgcttccagcgaaatcgagtatcgcggcgccctggcctggatggtcggcgaggagggccgtggcgtgccgaccatcatcgagatggtcgccatgacccgcttcgactgcatgatcggctccagcgcactgatgcgtcaggcgttgacccaggctgcccaccactgtgcctaccgcaaggtcggcgggcgggtgctggccgagcaaccgctgatgcagaacgtgctcgccgacctggccctggaaagcgaggcggcgctggccctgaccctgcgcatggggcatgccctggactgtgcccacgacgagcaggaggagaagttcgcccgcctggtcaccgcggtgggcaagtactggatctgcaagcgtgccccggcgatgatcaacgaagcctccgaatgcatgggcggtgccggctacgtcgaggaaaccatcctgccgcggctgtaccgcgaggccccggtgaactcgatctgggaaggttccggcaacgtgcagtgcctggacgtgctgcgtgccctgtcgaaggagccgggggtgctcgacgcgttgttcgccgaactgggcgacggccatggcgacgcccgtctcgccgcgcacatcggcaacctcaaggcggccttcgccgacaccgccgacatccagtaccgcgcccgccagctcaccgaggacgtggcgatcgccctgcaggccaagctgttgctggaagccggcaactccgcggtgtccgacgccttcatcggcagtcgcctgggggacggcgggcgtgtctacggcaccctcccgcgcggcgtcgaggtcgaggcgctgttggctcgcgccaccccgcacctgacctgaggcgcgtcgcgatgcaggcgcatccgcgctaccgggagctggtcgagcagggcttcgccgcggccagtttcgtcggcgacctcggcatccgtccgctggactgcgggccgggttgggtcgaagcggggctggacatcctgccccgccacgcccagcagaacggcttcatccatgccggggtccaggcgaccctggccgaccatgccgccggggccgccgccgcgaccctggtggaggaggggcagacggtgctgaccctggagttcaagctcaacctgttgcgcccggcgctttgccagcgcctgttgtgtcgcgccgaggtgctcaaggccgggcgccaggtgacggtggtcgaggccgaggtgttcgccgagcgggacggtcggcggcacctgttcagcaaggccaccgtgaccatggcggtggtggcgctggccgaatgagataacgggagaaaagcgctgtgttttcctgtcggtacaggcaagatgttttccatgcgaaccgacaggaagcccaccatgagtatcgattccgacgacgggttcgtcgtcgcccgcacggccgaggaggccgtcgaccgtcttgccgagctgcaccgccaggccaccgcggcgctgagccaggcgctcaagcgctacatcaaggagcgcatcgagccaagcgaggccgagcggcagaacttccactacccgcaactgcgcatcggctaccgctgccagggcgaggtgccgtccaccacccgcgcctacgccaaggtccaggtgccgggcgaatacagcgtcaccgtcacccaccccgacgccttccgcaagtacctgctggaacagttgcgtccgctgatggacgatttcaccgtgcaggtgcaggtcggcccgagccaacaggacatcccctatccctacgtggtcgagcagggcgacgagctggccggctccggggtgaccgccgccgagctggcgcgggtgttccccagcaccgacctgtccgccgcttccgacgacatcgccgacggcctctacgaatgggaacgcgccgaccagttgccgctggcgctgttcgacgccgcgcgggtggacttctccctgcgccgcctggtgcactacaccggcagcgactggcgccacgtgcagccgtggatcctgctgaccaactaccaccgctacgtcgaccagttcatccgcctcggcctgacccgcctgcgcgaggacccgcgcttcgtgcgcatggtcctgccgggcaacgtgatcatcgaacgcgggatggacgaaggcgaggccaacgccatcgtcgccggggtggtctggcaccgctaccagatgccggcctaccacctgatcgccgccgatggcgacggcatcaccctggtcaacatcggggtcggcccgtccaacgcgaagaacatcactgaccacctggcggtgttgcgtccgcattgctggctgatgatcggccactgcggcggcctgcggcagtcgcagaccatcggcgactacgtactggcgcacgcctacatgcgccgcgacggcatcctcgaccgcgcgctgccgccgcacatcccgatcccggcgctggccgaagtccaggtcgccttgcaggaagccgccgccgaagtcaccggcgagcgcggcgagtcgctcaagcgacgcttgcgcaccggcaccgtgctcacctacgacgaccgcaactgggagctgcgctgggcccaggagcggccactgatcaacctggcgcgggccatcgcggtggacatggagagcggcaccatcgccgcccagggctaccgcctgcgggtgccctacggcacgttgctgtgcgtctcggacaagccgctgcacagcgagatcaagctgcccggctcggccaacgccttctacgagcgcgcggtgaaccagcacctgcggatcggcatcgccgccctcgacctgttgcgcagccagctcaactcgctgcactcgcgcaagctgcggagtttcgacgagccgccgttccgttgatcggacgcgccgcggtttccgtgcggaaaccgcggcgcgcttctacgccttgcggcgccgaggccctacaatgatggcccttcgccctgcgtggaaccgcggcgccctctgccggtcggaacgaccacgcctgccatcgatgtgagccccatgccgttcagcgtccccactcatctcagcaacccgctccgtcgcttcgcccgccgcctggtgcccgatgccgcgccggaagtggcagcgccgttgccgatgccggaaagcctggccggcgaaccgtggttctcggtcgggcgggcggtcgaggccctcggcggcgagcgggtcgatggctggatcctggaagaatggcgtggcttggccctgcgcgcgcgtttcagcgcttgctggcgcgatccgcgcggcaacctgtggaatgtcctgccgcaggcgggcgccatcgctttcctggccgacccgcagcggcgctacgaaggcgtgccgctggccgaccagtaccaggcgctcagccgcgatgtcctgctggaagactatctcggcctgcggcgccaactggcccgcgccggcctggacgacgaggcccgcgagcgcctggccgggatggccgcgcgcctggaaagctggctggccctgggcggccgtggcgaccaggcttgtccgtgcggcagcggcaagcgctaccgcaactgctgctcccgcctggtggcctcggcctcctgagcgacgttgcgcggtgcgacgcgccactgctcgccgggtttcggcgtgccgaaggtcgccgggtccacgccttggctgcgcagtgccgcctggagcgccttgggcgggtcgtcctgctgttcgtcggtgagattgaaggtaccgaagtggatggccatgctggtctgcgcctgcagcgtgcgatgggcctgcaccgcgtcgtcgggattcatgtggtggtcgcgcatgaaccagcgcggctcgtaggcgccgatcggcagggcggcgaaacgcatcgccccgaagcgctggttgatcagcccgaactccgggccgagcccggtatcgccgggaaacagcagcgggccatccggcgagtcgatgacgaagccgagccagagcgtgcggttggtgtcgctgcgggtgcgcgacgaccagtgctgcaccggtacgccatgcagcgtcaggccagcgcccagcggcacggcctgccaccagtcgatctccacgacgtcggcgaaacctgtctggcggatcagcccggcgttgcccaggccgctgaccaccttggccgtcggccagcgccggtggagctggcgcagggtttccaggtcgaggtggtcgtagtggttgtggctcaccagcaccaggtcgatcggtggcaactggtcgagcgtcaacccgggcggatggtggcgcttcgggccgatgaaggcgagcgggctgacccgttgcgaccagaccgggtcggtgaggatgttcaggccgcggtgctggatcagcagggtggcgtggttgatgtaggtgacccgcagttcttcgccgcgggtgcgctcgttcacccttggcggcgttgccgtcggcggcagggcgacccacgggcgttgcggcgggcggttccactgccacttgagcaggtcgcgcaggctcttgtgcgcggtcggctggatattgcggaaacgttcgccgtcgaaatggtccgaaggcggaccctgataggcgctgccagcgcagccggccagggtcagcaggctgatcagccaggtgggacgcagggagggcatgaggggatgctcttgcggtcaggctctcggacaacctagcatgccgcccggtaccccgatcaagccaactcgtttccagtcatgtcccgtcccccgcgtccttccccgcgtcatcccgtccgccctgcgccacgccgggtggccaaggcgccgccgagcgagccgaagctgctgctgttcaacaagccgttcgacgtactgacccagttcaacgacgagcaagggcgttcgaccctcaaggacttcatcccggtgccgggcgtgtatccggccgggcgcctggaccgcgacagcgagggcctgttgctgctgaccaacgacggtcgcctgcaggcgcgcatcgccgacccccggcacaagctgccgaagacctactgggtgcaggtcgaaggcacgccggacgaggagcaattgcggcgcctgcgcgagggcgtgacgctcaacgacggcccgacgctgcccgccgaggcgcgtctgctggatgagccgacgttgtgggagcgggtgccgccggtgcgttttcgcaagtcggtgccgacccactggctggaactggtgatccgcgaggggcgcaatcgccaggtgcggcggatgacggcggcggtgggcttgccgacgctgcggctggtgcgggtgcggatcggcccctggagcctggacggcctgggcctcggggaatggcgggaagtgccggcgcggctggactgacgagaggggcgtcgtccagcgggcgcggaacgatcagtagtacgacttgatcacggcgatgccgcgacccatcacgtcgcgccaggcgtcgcgggtctcggcgtcgcagtcgcggtcgtgctcggcgacagccatcagcagggcgtccagccacaggtcgtagagttccgggcggatatccagcgcggcgcgcgaatggctggcgccgagggcgcgcagcttgctgtcggacatgccgcgggcgtacatcaccaggttcatgatcccggcacgcagcaggtgtttctgagcagtcatgtcggtggtggcgaacttggcgcgaatctgcggggaactggcaaggaaatgccggtagaaatcatcgaagaatccggtgctggcacagcagcgtccataactctgcatgacgcggtcggcggcgttcatggcgactcccttgttctaggcaatggcaaggcgagccggccccgttggccggggccggcggatgattacgagtggttggatgacgcgtgtggcgccggggttacatgcccgcgccttcgaggctgccgatgaccaggcccttgatgatgaagcccagtacgcccaggccgagggcgaagaacaggatcagggttccgaacttgccggctttcgacttcttcgccaggtcccacacgatgaaagccatgaacaggataagcacggtcaccagaccggtcatcatccactcttcgaacagttcgggatccattggcaacctccggattttcaagcaaacgaagtccggctcgcggtcggacggagcgtgccatggggggcgggcaaggcgtttatcgttctacgagcaggctgctctttatatgcgggggccacgcgggcatgacaactgaaacaggttgccgattatacggcatgccgcctgttccgtgtcatgtcccaggtctcgctacgatcaatcgcgcaggtgctccagcggcagttcggtactcgccagcacctgattgaggacgaagctggagcgcacgctggagaccccctcgatgcgcgtcagggtacccagcaggagcttctggtagtggtccatgtccggcaccacgaccttcaactggtagtccgcgtccatcccggtgaccaggctgcactccagcacttccgggcatttgccgatgacttcctggaaatgttcgaagcgttccggggtgtgtcggtccatgcctatgaggacgaaggcggtgaggctcaggccgagcttcttgcggtccagcaaggctacctggcggacgatgtagccgtcgtcctcgagctgcttgacccgtcgcgaacagggcgatggcgacaggcctatccgttctgccagttcctggttggagatgcgtgcgtcgcgctggagttcttcgaggatacgcaggtcgtagcggtctagtttgttcatggcgaggatttctttcaggttgattgccattggcaaggtgaatttgagtgatttattgcgcaatcaaggttctggtgagcaatattagcaatcattggtcgcgcctggcgacgtattcttttacccagattcacggcccggacatctcgtccatcacggctcgcccaatcaggccagccgtggccgccgaccctacagggttgcgccggcctccgggttgcacaccgcccagaaggtggagtgaggtgagccgtcgccaacagcgccgagccaggacagttaccccagaagggaggtcgacgggcctccctttttctttgcccgcgatccggcccgtgccgcgcttttacccattctttacccggcgtttacccacccttggcggaaaacggcggaaagtcgttcccgggatcattcgaacgtggccgggcgaccaggcccggggcgaggcagacgatgaacggtggatggtggcgaatgctcggggtgggcgctctctcgctgagcctgtgcgtccaggcgcaggccgacgacggccgagggggacgcggtggacccggcggcgagcgcggtgttgcccacggacaaccgggacctggccgcggcgaagcgtacggcggcagttggggaccgcatcccgactggcgcccgggccgggtggtggaggccttgccgcgcgggcacctgcgggtgccctatcgcggcggcgagtatttcttcgacgacggctactggtaccgacccgacggcccgcgctatgtgctggtcgtgccgccccgcggggtgcgcgtccgcagcctgccaccctatgcggagcaggtctggttgggcagcgtgctgtacttccttgccgccggcacttactacctgtggcatgccgacacccgtgagtacgaagtggtcagcccgccgccgcaggcagcggggcccggttatccgagcagtgtgccggccaccggctacgacgtggtggcctaccccgcgcgcggccaggggcccgaccagcagagccgcgaccgctacgagtgccaccgctgggcggtgggcgagagcggcttcgacccggcgggggcgacctacgcgccggccgccgaggtcgccaacggctaccgccgggccatggccgcctgcctgagcgggcgcggctacagcgtcaactgacggtttccttgccgaccacttcctgcgggtcggcatggatcagcacctcggccttcgggtattcgcgcttgatcgccagcactgcgcggtcggtcagggcgtgggccaccgacaggctcagctcgccgggcagctcgaggtgcaactggacgaaccagtggttgccggagatccgcgtgcgcacgtcgtgcgcgccgagcactcccggcacgctgcaggcaagttcgcgcatgcgctcgctgatgtcggtgggcagttcccggtccatcaggatcgacaccgactcgcgagcgatctgcagggcgctccagaggatgtacagggcgatgcccaggccgaacaggccgtcgctctgcggccagccgtagcgggccaggagcagtgccacgaggatgcttgcgttgagcagcaggtccgagcggtagtgcagcgagtcggcgcgtatcgcggtggaaccggtgcggcggatgacgtgggtctggaaggccaggagaagggccgtgagcagcagcgacagcagcatcaccgcgatgccccaggtggccgcgccgaggggctgcgggtcgcgcaattgctcgaccgcctggatagccaccagcaccgcgctggcaccgatgaacatggcctgggccaggccggccagggcctcggccttgccgtggccgtagcggtggtcgtcgtcggccgggcgcagcgaatagtgcaccgccagcaggttgagcagcgaggcggcactgtccagcagggagtcggtgaggccggcgagcaggctcaccgaaccgctcagccaccaggcaatggccttgccgatgaccagggtgacagcgacaccgagcgaggccagggtggccaggcgcagcaggcgggcgtggggggaatcgggactcatggggcgcttctgtcaggagggacggcgccactgtaaaccaaccgggcggcgaccgggcactgacgcacggtcgcgctcggagggcggatcaggcggccggcttcaggccataggccgccagttgctcgacgctgccgctgtggcggatgaggcgcgggtcgtcgagcggcagttcacggccgatctcgcgttcgaggatggccttgagcttgcggttgtcgaccttgccgtccgcgccgacggcatccttgagcacttccggggcgaccgagtacttggcgtcgggcaggtagatggcgccggtggcgaagtcgacgccgaaggcgatcaggccggggatgatatagaacagcaggccgatggcgtcgaaggcgacgatggccggatcgatgcgaccgtcgatctggccgcgtcgctcggggtagaacagcgtaccgcaggccgacaactggctcagcagggctgcactgagaacggcacaggaaacgcgggtggcaaggcgcatgtatgacctccgggtgaacatgacggcgaactatagcaatcgaccagcgttcggcaatcttctgccgcgacgatgacgataagaccgtcgaaagcgcctgccggttcgccggtatacttcgtcggtcagtccggagccagcatgatttccctacccatcgacgccgttgttcccgccctgcgccaggcccttggtgcacaacaccaggccgtcctggaagccccgccgggtgccggcaagaccacccgggtgccgctggccctgctcgacgagccctggctcgccggccaacgcatcctcatgctcgaaccgcgacgcctggcggcgcgggccgcggccgagcggctggccgccgagctgggcgaaaaggtcggcgagaccgtcggctaccggatccgcctggagagcagggtcggcccgaagacccgcatcgaagtggtcaccgagggtatccttgcccgtcgcctgcaagacgacccggcgctggacggtgtcggcctggtgatcttcgacgaattccacgagcgcagcctggatgccgacctggccctggcgctgactctcaatggccgcgaactgttgcgcgacgagccgccgctgaaagtgctggtgatgtcggcgaccctggagggcgagcgtcttgcggcgctgctcggcgaagcgccggtggtgcgcagcgagggccgcatgttcccggtggatatccgctggggacggccggcgcaacccggcgagttcatcgagccgcgggtgcagcaggcggtgctccaggcgctggcggaggaaagcggcagcgtgctggtctttcttcccggccaggccgagatccgccgcgttcacgaaggcttgcgcgaagcccttggcggacgccccgaggtgctgctctgcccgctgcatggcgagctcgacctcgccgcccagcgcgccgccatcgagccggcgtcgcggggcacgcgcaaggtggtgctggcgaccaacatcgccgagaccagcctgaccatcgacggcgtacgggtggtgatcgacgccggcctggcgcgggtgccgcgcttcgatccgggtagcggcatgacccgcctggagacccagcgcatctcccgcgcctccgctacccagcgtgccggccgcgcagggcgcctggagccgggcgtatgctaccgcttgtggtcggagagccagcatgagcagttgcctgcctacggcacggcggaaatcctccaggccgatctggccgggctggccctgcaactggcgcgctggggcgtggcgccggaggagctggcctggctcgacgcgccgcccgcggcggcctacgcccaggcccgcgagctgctcgggcggctgggggcgctgaacgccagcggcgcgttgagtgcccatggccaggcgatggccgaattgccgacccatccgcgcattgcccacctgctgctgcgcggccaggccctcggccttggcgaactggcttgcgacgtagcggcgctgctcggcgaacgtgacatacagcgtggcggcggtgccgacctgcacagccgtctcgccctgctcgccggcgaggcccgcactggcgcctcgcgcggcgcggtacagcgcgcccggcaactggcccggcagttccgcggttacctgcgcggcgccgccagcgaggcggtcgtcgatcccggtcatccgcgttggctgggttgcctgctggccttcgcctatcccgaccgcatcgctcgccagcgccgcgccggtggcggcgactaccggctggccaatggacgcgctgcgcagttcggcgaaccggacagcctgatgaagcagccctggctggtgatcgccgatctgggcagccgccagggccagcgcgaagagcggatctacctggccgccgaactcgatccgaggttgttcgatacggtcctggcggagcaggtcagccagcgcgacgagctgcagtgggacgagcgcgaaggcgtgctgcgtgccgagcggcagcgccgggtcggcgaactggtgctgtccagcgaggcgctacccggcctcgacgaagcggcgcgcagccaggcgctgctcggcctggtccggcgcaagggcctggagttgttgccctggaccccggaactgcgccagtggcaggcgcgcatcggcttgctgcgccggctggacctggaagacaagggcgagagcgagtggccggacgtcagcgacgccgcgttgctggaacggttggaggaatggttgccggcctatctcggcaaggtcacccgcctggctcacttcgccaacctcgacctggcttcgatcctcgccgggctgttgccctggccattaccgcagcgtctcgacgagtgggcgccgaaaaccctggaagtcccctccggctcgcgcatccgcctggactacagcgaaaccccgccgatcctcgcggtgcgcctgcaggaactgttcggcctcggcgacactccgcgcatcgcccagggccgcctggcagtgaagctgcacctgctgtctcccgcgcatcgcccggtgcaggtgacccaggacctggcgaacttctggcgcagcacctatgcggaagtcaggaaggacctgaagggacgctatccgaagctattccataagttagacccttgggttgaatcgcttaacaacaaaaagattgacaggtagcgattgtaaactgacgcataacatataggattgactgattcatcagggggggcgaatgtcctacaccaatccgcgtcacgaaggtcgtctgattctcatcccgaatttgcaggatgccttcgctatcctgcatgtcagtgaagcgcctcgcggctctattgagtcagcgcttgagggggctgaatccaatctgctttataaatgcgatgaagtcggttcagggaatgaccgtgccctgttcaatttcccatttttgtttagtgctaatggcaacccttggcacgaagcgaacgactacttgctgagtctcatgcgtgatagggctcctgcaagtcgacgcactgatgatgttaggcgtcgtgccagtaaactgttggattacctcctattctgtgaggataacaatctggattggctcgacttttccggtgcccgtccttcgcttcgcccgacttacaagtacttctatcacctgattaaagaaggccgtcgcagtaatcaggtcatcaatcaatataccgctgcggtctatcacttttataagtacgtttccgagcattggcattacctcgatctaaagcgtgttgatacgatcaagcaagtgcggcttatcgtgcagagcccaaaaggcgcgaaaatcatcgatgctgaaaagcgcagccaaacgcggcgtacgccgcctagtagctccgttcctttgggattcgtgcgtgaagatggcgaggatcttcgacctctctccaatcttgagttaggcgcgcttttggaggccattaatgaaaagaaatggtcaacgattgagcggttgattcttctcacgtctctgatgactggagctcgtaagcaaagtgttttgaccatacgcttgaagcatttgaaaggatttacagaagacaaactagtgccggaatgtgcctataaattgcatgccggcccgcgcacaggcattgatacgaaatttgacaaaactcaagttctgtatgttccaaagcaacttgctgaagaattggtcacgcttgcacgtagtccgatgatgaggagacggcgggaaaaatttcgtgctcaattagaagtcagtcatcccggtctgttgatagaagaggacgatatgtatttgtttctctccgatcaaggcaattgttattacatggcttcaaatgatccgcgttacgcaattgttaggtcgccacagacagggcaggtgacggaaacaataaagcgaaaattgcagagtacagcttctagccaatttccaaaagattttacatatcactggctgcgagcgacttttgcctatcaactctaccagcgcctgcaaccgttggttcaagaaggcgttttgaaattaggggaggatattgattttattcaaaaacgtatgcatcacgagtctagggaaacaactgaaaactatctaaagttattcaatatgactcacgaaaaagtcatcgcccaagaggtgtgggagaagaaattgtttaacggtaactacgaagtcatgaaattgacggtccaagaatgagtagtcggcagctgttagagcatcgcgaaaatacaaaaattattacgctaaatgagttggttcaggagttttccgaacctgagcgtttgcgattgcagctgaccgttaaggttaaaaagaagccgttagatattggtagttttgcatatctcattcgtggtaagaataaaagtgttcatgatgatcgcgggacgccattggtgattgagtcgttcgttgaaagtcgtcgtgagctgattgtgagagttttggagtcttttgtcggtctgcgtgataagtcagtcttggcaaatttcttccataccgaatattttattgattggttgaacgctgagggttaccgagaaatattttccagtagcgtggatgctcaaaaggcatatcgagattatacagcgcatctaaatcaaaaaatatccgataaaaagctgaagccccggaccgcgtcaagctaccaaactagagcatccagcctgatcaaattactttatccagataatagtgtccatattcttgctggtgcagtaaggattgttccagatagaggttctgcaacagcaggcgctgctcatgtcgagttgtatagagatgtttgctttgccattgcccagcagtgcagtgattttatcttgaataaaaaaccttacccgctcgtggttggagttagagattatgaagttgttatatttccgtccaaccgaggcgcgagcagcccatttaaggatgctgctccttcatataactcagctgagcggcgaattgctacggccgaagaatacttcgcggccttcgagaggcttggccgaaaaaagccgagaaattataatgtcgcgcgcgaactaagaagctcccaggcatctttggatgcggctaatgaagatgggcgcaactggcatcgtcttaatctagcgagtcttgcggcgaaagcctatgctatccttttttttatgattacaggtgccactccggctgaatttgagcagtttagttacgaagacgcactcaaagttgaaaagtcccctctcaagaaagagttgtcggctgtgaaatttcgggctggcggaaagtcaacgctttacaacattgggcggggctcgggtttgtcgctgctgaaagagtatttaaagctgcgtgcgtggattttggatggtgcgagacatgagcgactattctttgcaatgcctacgtctggtcagcttagaacttgcaaaagctttggtgatcttaacgtgacaagctccttagaaaaattttatgagtttattagcggggtctttcttgatccgactgtaccaagactttcaactcgtaaaatacgcaagcacaaaagcactgaaatgcactctgcacgtttgtcgccgtccacggtagcggcatccctcaatcacaccgaagcggtgaatctttctacctatgcagaggcaacacctgaacagcagcaatccgagttcagcctgttttgggatgcaatacgccacgctgctcatgttgtgcgtgagcgaagccgcaaggctgtagcaagtagtgtcgcaatagcggcgggtcactgcgaggatttcaataagccgacgtctgccactgatgtgggattgattatagagccgaactgccgcacccaatatggttgtttgtactgcgaaaactatttatgtcacggcgatgaggaggatctgcataaaattctgagtttgcaatacgtggtcaatgccgtgcgtaaatcggcccccgatgcagcgcatactgaggcacttttcaaagagttatctatccggatcgagtttatagtcgatgctcttagtgagcgctctagctcggtgaaacagacagtcgaaaaggttaaagctaaggtgtttgaatacggcgagttaactaagttttgggaagtccggttgggtcgctatgaaaaaatggggatcgtattttgagtgctgctgttcagtcgataggtagtcttttttctagcggccagtttccagtcaccagccagccagatagtgcggctcagctgtatgggaagcccgcgtcggattttgttatctgtcgcactgagtatggcaatgcaacggcagtgtacggcgagtctgtatgggactttaacccgtacaggctgagtgcaaaaaaaattggccgaatacgcttcgatatggtgttcggtgattatggtcatgatcagcaagcgctgatcgaagaagccaaatatcttctgtattgtcttatttatttcgctggcggtgggcggattggtaagctgagtgcatctacgattatttcatattgggttgtgctgcgcatcgctatgaagttctgctatgcgcagaaaaagaagtcaatggttggtgtgctgtccttgcagcagctttttaccgtgcctgtttatctagcggcttttgttagtgaaagtaattttgacaagacggttcttagtgggatattgcacggattgattagtgtgggcgaggaacgcctagggtatgttgtgctgaatccaagagtttttgatttgagaagacctgattctaaacagcatccggtaattccgacacgcctttatttgaatttaataaatatttgtggcgacctgctcgatcatctttacttgggtgttgggaatattgattcatttatatcgtgctttgctgatgagtatttcggtcttactccgcaccgtcaaaaatctttgggggttggtggtaagtcgcgctatcgccccggtattcagcaagcaatagaggaatatggtctggctgcggtttttgtcggtgagtttgcctgttccgaaaagagaaagctgcagcgagtccttctcaagatgcagtatgtggtgagaatggtgatacacctatataccggcatgcgtgatcaagaggtgatgcgtatgtcttataactgcttatctgatcaagtcgtgagatgttcagtggttgatgatcaaggttttatgcgcgatcaaccgcaatcagtacacatattatcgactaccacgaagtttagcggttacaagaaagaaagcgcatggttcgcggcaggcgaagtcgtcaaggcggtcgaggttggccaggcgatttgtcgtggtttagcccggctctataggattgaactggatgatcgttgtccgctattcatcaatccgtccgtcctgtgtaaaacgaagaattgtgcagaagttggtgtaacagactttacattgagagcaacgatgggcagtgctttgaaatccttatcgattcaatcagaggatttacaagagttggctcagagcgacccttctcgtgacttttacaatgagccagattttgcagtaggccagccctggccgctgactagccatcaattccgacgttcgttggccttctatggaagcagtagcggctttctctcgttaccgactctgcgagcgcagttcaagcatatgaccattcagatggcgcgctattatgcgaatggctttgataacttgcgcaccatttttggctactatgacgagaagaaaatagacttcgtgctaccatataaccactttgctttcgagttccagatggccatgccgatgtcggtggccaatcagttgattgcagatctgctgttcaaagaagaaccgctgtttggtggcaccggttcatacatgcagaggcagaaagaacgtgttgaagctggcgagataaagattgaagatattcgtgccgatacagagcttcgggtgaagaacggtgcaattagctatcggccaacgctactcggtggttgcaccaaggtgggccgctgcgattccttcatgctcggtgactatactgaatgtttgtcctgcgagggtgcgattatcaagccctccaggttaagtgcggccattgaggatgcgaaaaacgagttgtcaaactacgcagaagactcaggcgaatatcaaattgtgaagggcgatattgagcgcctaatggttttcaagactcgcctgatcgacactgtggagctttagtcatgaagtctggtgaaggaataagcaagggggttggtgcctgtcaggaagctttgcagcgccttctcgatgggaagccttttatgcccgagcatgtagggctagacctatccaaacttaccgcgagcatcgtcagtcatgaggctggatttgaccgtggttatctgaaaaagtctcgcaaaacacatttgccattactcgcaaagatcgaggcttgtcgtgctgaggctgacaagggctgcggctcatcaagtggtaaaagcattaaacgtttagcagataaagttttgtttttagaaaaagagctggcgatggtcagttcgcagcgtgatcgagcgcttacacagaacctccagctatgggcgcgcgtgagagaactggaactagctgagcgtcagaacaagtcacgccgggttcggctacatcattgatagatttacgcctcctcgacagcatcacaagcgtcggggaatgttctagctagtagtctggataatgaggttagggccgacagcattaatgcaatttcaagccttcttgagcgccagcgtcgatcaggtgggctaaagctctgacgcctgaggcagtaggccgcatggatcgcatgcaagcacgcttgcgatgcgatacagcttctcgacggtgatgttgacctcgccacgttcgatccgccctacgtagctgcggtcgatattgcacgccagcgccagtgcatcctgggaaatccggcaggccttcctctgcactcggatgcgttcccctaacgctttcgccaacttatccatgaccgtctcaattcaacttgaggcggcactatcgtgcgtttgcggacgcacaggccacggattataatccgcatttctttcgcgctaactcttctggtgcctcaatgaaatcggcctcgtttatcttcgacaggcgtctgtatgagctgcttcaggagccagggcgtacaacctttacgacccgtgaactgcgcgatgcctatgctgctcgcctgaatggcacacatttccgtatcgccgatgtgcgacgctatgtgtatgagcagatccgtcgactagtgcgcgcgggctgggttgcactggacgaggaccgtcgtgtccgaggacaggtctaccacctgcagccgattccggcacacctacaactggaactgatcgacaacggttttgagagcagccttatggctgccggagtgcccgaaccagacacggcggtacgcgacgtggaggctttgccggccaatacggatttgcagttggaggcgctccacaaggaaatccgcttggactttctcacttcaatgggcgaggcagagcgattcaagctgcttctggacgagatgccgcatttgcgcgacaaggttgaaggcgattacctggaggccagggatcgcagttctcgccttctgggccatttacgcgccatagaaaagaccctcaaaacgctcgcagcgccacgatgagcagatcgctacgcagctggcagaacagctgcatcaccaaggcgttggagcaccttaccgtcacgcagcacttcttctgccaggcaacgccgggagccgggaagacgcgcatggccgcggagctgaccagccgactgcttcagcaggacagaattgacctggtgctgtgctttgcgccgtcctgccaggtcgtggagggttttcgttcgactttttcggaagtgctaggcagacgtctcgatggccagatgggtgccgtgggggcggcctatacctatcaggccatggaataccgtgatgagggattctggcagcttcttgatgactaccgggtgcttgtggtcttcgatgaaatccaccattgcgccggccacgatccgctcctcagcaatgcctgggggcagcagatactgcaccggatacaggatcgcgctgtcttcacgttggccctgtctggcacgccctggcgttcggacgacaaggccattgccttggctcgctattcgtcgcccgaagggcatttgatctgcgattaccgctatggcttgaaagacgccattgccgacggcgtgtgccgatcccctcgcattgtgttgctcgataatcagaaggtgaaactcactgaagaacttggcgcggatagctccgtcaggctgtttcccagcatcgccaagcttttgggggagtcacctgtcacctatgaggaactgctgcgccatgacgacgtgatcaatccaatcctcgaccttggctacagcaagctcaacgagctacgccagatcaagcctgatgccgccggcttggtggtggctaccgacatcgaacacgctcagcaaatagcccaggctctggaaacaatgggtgaagagtgccgtatcgtgaccaacaaaaccccggatgcgcagcaagtgatcaatgcattccgcagcaacacctgccgctggattgtcgccgtaggaatgatcagcgaaggcaccgacattccacgcctgcaagtgtgctgctatctcagccgtatccgcaccgaactgcattaccggcaagtgctgggacgggtactgcgacgcacaggtgaatcggatgaccaggcttggctattcatgctggcagaaccgaagcttcagggctttgcggagcgaattgcagatgacttgccggatgacctggccgttttgagagatgtgcagatgcctggatttaatccagactcaaggcctgaaccgatgggtgcttcgggccatgtcaagggtatcggcgatgctgggttaggtggcgcagaacctggtattgggtcgcaggctacgaacatcatttcgctgggtggctttgcaaatgagcccgcttaccaggtcagcttttcccagcattaccggcagcagctactggcttgtttctgatgctcagccagtcgaggctgctcgaatgatgccggtgtgcatgaatccataaccggccggtgccgcgtggaacgtaatcgtgaggtgcgtatggaggttaggtcgcaggcattggtcgatgtcgttgaggatgtgatctgcgacgtgtgccgctctggaactcgtatccctggctatggccttcaatacggcaagcttgaagcccaatggggatatggatcacagcatgacggaaagcactatcgggtgcatctctgcgagccctgctttttcagggtgctgagtggattgcgtcgggagtgtatggtcaatggcatgttcgatgatgagcagccattttcctctgaggattttggcttggtcagcaagggtaactactgggaaaagagctgatgacaggactgcggctgagcgatcttcttgaacccgtcatgcagcttgcttacgaagcaggcctacttattgagtcagagcttaatagaccagacggcccaaggggcagtggctttaaggcagacgtcgatgttgaaatcgaggtacttctgcgacagcgactgaagcacatccttaattgcgattttgtcggagaagaaacgggctgcgagctatcaggccacccatttagttgggttgttgaccccaatgatggaacaggcgacttcctcaatcgtcggccgggctctgccatttctatcggattgctgcataacgcaacgccagtgctgggcgtggtttacgcccccgtcacgcctagtggtcctgactgcatagcatgggctgagggtgcaccggctttactgcgtaatggtcgtcccgtgaataatgacctgcaatctgcgatcttgggtaagcgtccagccaagtcaccttccgaactccagcattaagggcgatggtgtccgcgtatttttaagcggacgcgttcgtccttaacgttaggatttccatgcgccaacgaagctcttaccccgaaccgttcaaggtccaggtcgttcaggaatgcctacaaccgggtgcgaccgtctccagcgttgccatccgccatggcatcaacgccaacgtcattcgaaaatggctaccgctttaccgagatcagctacccgcggcgttgccggcgttcgttccattgagggctacgcccaaacggccgactgcagcatcggtgattattgagctatcgcttggcgagcagtcagtcacagtgaaatggccagtgtccgatcctgacggctgcgcccgctttgtccgggggcttgccccgtgatccgcatcgatagcatctggcttgccactgagccgatggacatgcgcgccggcaccgagaccgcattggcccgtgtagtggaggtattcggtgcggcgaagccgcactgtgcttatctgttcgccaaccgccgcgccaaccgcatgaaagtgttggtgcatgacggtgtagggatctggctggccgcgcggcgattgaaccagggcaagtttcactggccaggcatccaccgcggctcggaagttgaactcgacaccgagcagcttcaggctttggtgctcggtttaccttggcagcgggttggtgcagccggtgcgatcacagtgctgtagcgccggccattagcccatcgctttatctgcgctgatcgcctgctctggcacaatcagcggcatgacttcctcgcccaatctcgaccaactgacacctggtggtttcgtcggggatgcgctccaggttcagcccggcaaactggcgcaggatcgtggtttcgtacagcgcttcctccatcgctggatcgctgtagccgaaccagttctgcagcagatgcacacgcagcatcgccatcaacgggtaggccggacggccaccttcacccttcggataatgtggctcgatcaaagcaatcaagcccttccacggcaccacccgatccatctcgatcaggaacaactccttgcgggtttgcttgcgcttgccagcgtactcggcgtcggcgaaggtcatctgcttcatcgggaaactcggtgggtggggtcgcggtattttgccaaatcagaaagtctttttcagagtttccctaggctgacaagccaagcgctggatcgcaaccatccatcaccttatccagctagatctgcctcctccaataagtgccgcacaaatcccggcgggtgcagatttccgggaggtttgcgccagatcagttggagacgcttttcaagccccgggatgggaagagctaccagcgcgccactgcgaacttcgtcttgtactgcggaagccatcaccaacgacacgccgagtcccgccctcactgcttgtttgactgcctcggtgctgcctagctgcataccgctgcgaggcacgcccagttcgccaaagtattcggtcagaagccgtccggtaccgctacccggttcacctcccagcatcggcaggtccaccagacgatcacgttctatgcaccctgcttcagccagcgcatggtcggggctgacgataagcaccagcggctcgacccgccagaggcggtgttcgaagtcggggtgaggtagccaccattccatgatcgcggcgtcgagctggcccgccagtagctggtcggccacatccgggttggcggcgatgcgcagatccacctcgcccctctcatttgcggtcgtcagatagttgcgcacgaatggcaggagaaggtaggtgccgatgttggagctggccccgacgcgctcacgattgccatgcagggcttctagcgcccgggcgtgcatgtcgagcaaggcggtcgcatgcggcatgaaggccagcgcccgtgtggtaggctggcagccgctacgactgcgctgcaccagcgttacgccgacctgctcttcaagcttctgcaagtgctgcgacaccgtcggctgggccagccccaacgccctcgccgcgctctgaaaactgcctgtttgaacgatcgctaccaggctcttcagccagaccggattcaacatgcggcaggctcggccttgggcagacggttcgcagcgttgattgggcgcgcacctgccaatgcctggatgatgttctgcgctgcacaacgttcaatctccaggcgcaccgcgcgcactgccgaccctatgtgcggagtgaacagcgtattcggatgcgcgagcagcgcaggatcgatcagccgcggccggtccgcgcgagcccagtcttccatttcgaatacatccgccgcatacccgccgagctggcctcgctcaagcgccgcgagcacggcggcttcatccactaccgaaccacgacaggggtttacaagcagagcgcccggccgtacgagggcaagcagctcggcgttgaccagatgctgggtatcggcattcaagggaagcgccagcaggatgaagtccgagctggcgaagagttcgctgcacgccacccggcgcaggccgagccgttgctcggtttgtgtatccagagccttcgcctcgtggtactgcagggtcgcgccccatccctgcaagcgatcagccatggccagtccgatggcgcccatgccaaggatgccgaccgtagcgttatccagccccgtgccgtagaactgtggttgccagccctggaacttgccagagcggacgaacgcatctgctgcccgcagatgccgccccagccccaccgccagtccgatcgccagctcggcagtcgggaccgtcaacagatcaggcacgaaggtcagccagaccccgcgggcagtacaggcgtccacatcgaaattgtcgaagcccttgagcgcgcagccgactacacgcagctcagggcaggcttgaagaaagtctgcatcgacccgatcgggcatgaacgccatcatcgcctgagcatcgcggcagcggcgcagaatttcctcgcgcggcagcgtgctgtcggtctggttggtcatcagctcgcaatgtggcgccagcagttgcaggatctcatcgtgtactcggtgagttataacgagtttcggcagcatggtttgtcctatttgaaacgtttgcgcagcacgccactgaaggcgtctactagcgtgaccatggccaggatgaccagcaggattgctgcaacctcctggtactgcatgatgcgcagcgagcccatgagttcgaagccgataccgccggcgccaaccatgcccatcacggtggaggcgcgaaagttgtattcccagcggtagatcgccacgtcggcgaactgcggcgtcacctgtggcaaaaccgcgtgcagcagcacttgcatcggcgtagcccccgccgcccgagcggcttccaccggcgcttcgtcgacgtgctcgatggcctcggcgaagaacttgccgaccatgccgaccgaatgcagacccagggcaagcacgcccggcaaggcgccgaaccctacggctgcaacgaagatgatgcccatgatcagctccggcaccgaccgcagggcattgagcagcacccgggcaacaccgaacacaagggggtgcggcgccgtattgcgcgctgcaacgaaggccaccaccagcgagaacaccactgcgatggccgtaccggcgatgctcatcgccaaggtgtcgatcaaggggcgaatccagcttcgatagcccgaaaagtctggcggcatggcctcgcctgccagggtcgcgatggagggcagcccgttcagcagcgtggtggcatcgagcagccccacgtaccagcaggccaacagcaccactccgaatacaatcgccacctgccccagctggcgccaccaaccgaggccgaagcctcgaaggatgtgctcgcgttgctctgcaggcagcgcctgcacgtcgtaatgagtagacatatcggtgctcacatcgtggcgaagtcgaggccgagcagcgatcccatgttgcggatcacatcgtagtcggcgtcggtgattggcgcgaaggcctcggccttgaagttgcgcagcacttcgggatcgtcgataccgacgaatacatcccgcaccttggttttcagctcggggctcaggttcgagcgcatcgcccaggggtactgggggtattcgccgctgtaaccaagtactttcaccttgctcggatcgattaggccacgttcgactgcgtgattgaaaattacctccgacagcccacccgcatcggcgttgccgttcgccacgttgacggcaacggcgtcatgcgtgcccacaaaatgttgttcgtagtcctgcccacccgtcaaaccggccgtctcaagaagcacggctttgggaatcaaatggctggacgtcgatgcccggtcaccataggccatcttcttgcccttaaggtcggcatactcattcacgcctgacgccacattggcgataatcaccgagcgataggtcggcttgccgtcgatgaccatggcagcgaagggctcgatgtcgcttttgcttttggccatgacgtaggacagcggaccgaaatacgccaggtcgatacggccaaagcgcatcgcctcaatcatcgaggaatagtcggtggttacgatcagctgcaccttcttgtccagatgctcttccagataatccttcagcggctggttacgcttgatcagctcggaggcgttttcgtccggcagcagggcaacctttagcacatccggatcggcatcggccgctagggcggacaaacttgaaacagcggacagcaagcaagtcaataagagcgcggataagcgtttcatcgggacatctccagtgaaggttcgagcatgacaggtggttcagccggagcattcgctggctgagtcgtagagcggcctgcatagatgcgctcaagctgcgcatcggtgagttccgagggcgcggcatcgaaaacgatctgagaatcggccagcccgacgacgcgatcggcgaagcggcgggcatattcgagttgatgcagcgaaacgatggcggtgatgccgtcttccttgcagatgtcgcgcagcaatccgagaacacggaccgaagtggccgggtcgagactggctaccggctcatcggccagaatgatcgccggctgttgcgctagcgcacgcgcgatgcctacccgctgctgctggccaccggacagtttgtccacccggcttagcgccttgtctgccagaccgacccgagcgaggcaactgagcgcaatctcctgatcggcacgcggcagaggaaacagcgagcggagcgtgttgtgaaaggccagccgaccggtaagcacattagccagtgcgctttgacgttcgattagctggtggtgctgaaagatcatggcggtacgccgacgatgctgacgcaaggccgagccgctgccgagttcaccgagttcgctggtgacactgccgccagtgggcgtgacgagtcgattgagactacggagcaaggtcgacttgcctgcgcccgagagaccaagcagcacggtgaactcaccacgccgaaatgcaatcgaggtatcgcgtagggctgtcacgccgcctggatagacgacgctcaaccggtcgacccgcagcacggcgtcctgtatcggatggggcgtcatttgatcacctttcgcaatattgctggccgcacaattgcggttcgcgatgcaaagggtagaaattccttgttaacgcactgtttctaaaggatgacatttcgatgaatacttcgaatctgccgtagcggggcggcaagcgaagccgtggaagaacgggcgcaacgtagcgtctttcttcacgcgggatacaggaggctttgattgatactgctgcggattcgctacagtaacgttgggccagaacgtaatgccatccaagcaagagagcgcacactagggaaactctgaagaagacttccagattttggcaaaatacccggattccacccaccgagtttcccgatgaagcagatgaccttcgccgacgccgagtacgctggcaagcgcaagcaaacccgcaaggagttgttcctgatcgagatggatcgggtggtgccgtggaagggcttgattgctttgatcgagccacattatccgaagggtgaaggtggccgtccggcctacccgttgatggcgatgctgcgtgtgcatctgctgcagaactggttcggctacagcgatccagcgatggaggaagcgctgtacgaaaccacgatcctgcgccagtttgccgggctgaacctggagcgcatccccgacgaaaccaccattctcaacttccgccgcttgctggagaaacacgagctggcggccggcatcctcgctgtcatcaatggctctgggcgaccgcggcctgtcgctgcgccagggcaccatcgtcgatgcaacgctgatcaatgcgcccagttcgaccaagaacaaggacggcaagcgcgacccggaaatgcaccagaccaagaagggaaaccagtattgtgtgtcacgaacacaggtcagatgacctgtgctgctgtgccgaagatggaagtaggccttccgaagtcggcttgcaggagcggacttcaaaccacccggtgctgctgcatccaaaaggtgtggtggtgagcgaccgaggaaaagtcatccctgaggatggcaggtgagtatggagaagatgagcgaaagcaaaccgtccgatgacgcatcgttatgcccaaggtgctgccgaaactgaggtggagtactggcttcaggacaagtcggggcgttacctgcttacggacccgatggcagccggtgtataggcggcatgatcttcatacaggctttggtacggaacgtgagaaccttgttccagatgcgaaggaaaatgacaaatggccaacaccatgaggaagaataccgatgctggaacgaggggcggagcttcccgtagtagcgatgaagcctctgtaatggaggtggagcgaaggggcggcgttatccggccgacgagcgttgccaacctccggggatgagtggcgtgagctcggcgaaaccttatgacatagcgaaacgcacggtatgggacgcctaccagcaggtcagggccaaccgcggtgctgccggcatcgacgatgaaaccatcgccgatttcgagcgggatctgtctaagaatctctacaagctgtggaatcggatgtcgtcggggtcgtacttcccgcctccggtcaagcaagtagaaattcccaaggcatcgggaggcacgcgcaagctgggagtgcccacggttggtgatcgtgtcgcgcaaaccgtggtcaagcttctcatcgagccggagctggactcgatcttccactcggactcctatgggtaccggccgggacgatcagcgaagcaggcggtggcgatcacgcgtgagcgctgctggcgatacgactgggtggtggagtttgatatcaaggcagccttcgatcagatcaatcatgggttgctgatgaaggcggtgcgcctgcacatcaaggaggactggatacttctgtacatcgagcggtggctggttgcgccgttcgaaacggatgacggcatgcgcgtcccacgcgaacgcggcaccccgcaaggtggagtgctcagtcccctcctgatgaatctgttcatgcactatgccttcgacacctggatgcaacgtaccagccccaactgcccgtttgcccgctacgccgatgatgcggtggtgcactgccgcagtcgaaagcaagcggagtacgtgatgcgctccattgcttcacggctggctgcctgtggcttgacgatgcacccggagaaatcgaaagtcgtgtactgcaaggacagtaaccgtcgcgcaggttatccgcatgtgagctttaccttcctcggcttcacctttaggccgaggaaggcgctcagcaaacaagaccagctcttcacgagcttccttccgggagcgagtgcggatgccttaaagcggatgcggcaagcggtacgcaggtggcgactcaatcgccaaacccacgtgacgctggtcgacgtggctcggctctacaatccagtgatacaggggtggtggcaatactatggctcgttctatcggacagccatgcttggcatcttccagcacattgaccgcgcgcttgaacgctgggcccgacgaaaatacaaggcccttcataggcgcaagcggcgcattagccaatggctggacaagatgcggactgtggtaccccggctgtttcatcactggcgagtgaccgggcagcaaggttggataacgggagccgtatgacgcgagagtgtcacgtacggttctgcgagcggctgcgggggcagttcccgcggccgactcaccatttcggcagtgcgacctgaaagtcgcatgggtttctgttccgcaggttaacgcccgacggaaccgactgttccaccactcgttccctacccagacaggcgtggccggtaacagccgggtctgaagctctggggacaatgtaaccgccgatatttcggtaggtcgaaccgcgaggccagactgaatctgccagcatcaaggcggagaggcgctagggatgaacaggtacccgccaactgcacgggggtgatggtgctcgcttggcgactggcttcttgctggaggttagagattgcttcggcaattgccttggtctgagccacatagctgccggataggttggcaatcacaatgcagcaacgcggtaactccagagcggcgctcatcaggcagctgagtgtgtaggtgctcacggtagccagcgtaccgccgccgatgacagtagtgctcgcgttttcaaggtagggcggcaactcatcgagcatgatcagggtcggtttgtccccgataattttcttccagccagcctgatcgaccgcgcgagggccattgacccagtagggcttgatggcttcctcttcgcctagttgggtagtcgcgaatgatggggttgaatgtgcatgcctgcttgactgtcttgagcatctgctcgactccctgagaaatacttaatcgttgctcgactgactggagggtggggtgggctgcggaatggaaagctcctgactcacctgctgcagaaaccactcacgcatggtcaacccacgcgccttgagtgcggcgtagatctgctgcttttgggcaggatcaacctcgatcacaacgcgattgctagttttcataggcatgggcacctggcttaggtttgtaacgtgacgtgatgttatgttcgaaggggaggggctggaagccctggcgtacattaatttattttctcttttaggagcatcttgaggtaggcccccgtggcctggccgttacttctgccaagtactaaaaacggggtaccggccggtcatcatggccttcgactgctcagggttaagatcctgttgttgctcctgccagttgcctgatcagacgaaacgtccccggtatgagcggcgggctgctagtccagatgccgactcgcctggggaccagcccgaattacaccgggacttatgggctgagtgggcagctatcgcaggaaccacagcaaggcttgccgtgcatggagtcccaatattgccgctcagcctcttcccagtcccgcaatgcgaaagccagttcggtagcctgctttgcatggtcatggcagcgtcgaattcgtttaggacggcggcgtccatacaggccgcagaagcagcgccttttttggttgattacccgccgggacttttcccacacgctaaacaaaggcactgttccggagatcacatccaagataggtcgctctttggactttctgcgcttgagccctagctgatttaccgcaagatcgttagcgattttgccactgattgcgctcgcagccttctgcgctcgcagttgatgtcgagctgcgtcgccgtgtgcccacgcggaaccattcggccatctgcgcagagtgcgagcgcgctcttgaagctttaggtatttgtagattgtctcaagccaggcacgagcggacggctcgtctgagacaggaagcggattggcgcccgcgtaaaacagacagaacgtaccatcataattgatgtgccgttccgggcaaaagcctggcaagtgatgtggtgtgctttcgcgtgcttctatccattcaccgtcttggcgtaaatgcagcttgtaggggagcgttctcccgtccaccagccgaatcggaagatcaagcgttgctgtctgcggaacggatgttacacaggtacccccgaaatctggggcgacctgtgcaatcaggtcgagcgctgtgctcaacggctgccgtctactttctggcgggagtggggctgcacctgacgctcatctgcgcgaatgatggcggcggaacccgcataggcttccgagcgagcttgcttcgcagatgcgtccccatcatctgccagggcttcggtagcttcgttgtagtccaggtgtgatgtcttacgactcttcccaaacaggttctgcacagctttcgatgctgcgtcgtaagctacttgcccgatcgcggtttccacccccgaacacgcgcattggcgtttctcagactcgatcacgctacgcccgatagcgcacctaactctattacccttggcgcccaggcgcgtgacggctattgggcccagatcgaagccaatcgcgaggccgaggtcgccggtttcaataccttcggcgttcagccgctcaattgcgagattgaagctgctgcgcagtgcacctgctagccgtgtggcctcggatactgacttctcttcgtcagtagtatgcgcggtgccgtcacaggatagggcttgcacgcagtctccgatgaagcgcacccggcgcccttcgaagtcggaagtcacgacccgctccagctcggagcggatgacatgcaaagtccgcacgacatcgtcggtcttctcgttgatgtgatcggccacgtaggctgtgaagccatcaatatcggcgtagaggctcaccatctcctgtcgcttcgagttggccggagtcagcgagtaaatgtccatatcacgcaggggtggggtttggcgggaaaactggtaaccgccaatggggttctttttcagatcctcacgccactcctcgacgatctcgtcggacgtgacatccagcttggccgcatcctgacatgccttgatctctatcgcggttagggcagatttttccggctcatcgctttccgcaaggccgatggccttacgagcattgttggtcagatagatacccctggccttgttattactggccagtttcgcggcatggttcgctggatcgcccaggaacaagggttcgcggtacccgctgcggccattgtttacagcaagagctaggccggtatcgatgccaattcgaaccttggctgctgggatttgctcatcgtcgtcgcccgtctctgcaagcacgtcaatgatcaattgcgcagtcgcaacggcgcgttgaacacgcttggtctcagcgccggactcagtgttgtacggcttagtgaaaagggagtgcagccgctgactgtggaagtcgacgcggcgcgcatcaaccttgttgagaattcgcttgactgcccggtagtgctggtcaagaaagcgcagcgtgcgcttgtgacactctgtgccctcgactgcagtgatgttcagcatgtcctcgagattcatgatgtccgcatacatgtggaccccatccacgcggtacgcggtactggtaggaatcgattccaacgacatgtcgcgcacgtaatccttgatggtgatttcctcaacatcagcgatcttctggtctatgtgttttgcagcgcgatcatggttccagctcttgctcatcgatcactccttcgggtgattgggcgcgctgcaatgcggtaggcaagcgcatgccaaatttgcttgttgacagatatccgttacttcggtcctagcttgttgaaaatggtgcgtagctgattgcaggctggagataggctggagggcagctggtcttcacttttcgttaggcgatatccgatggttgtcagccctttcagatctgacggcagatgtacctcgtcacccctaggctcaagaaggaaggttcgtgccctgccaagtcgtcctacgaacaggccaagctcgaaaatgacgttgtcgcgcggcgtattcttggtttcctcgcgcattgtgacggagtcgtccggctgtgcgattgcgatggcaaaatcgcactcgtccagttgctcttcgaggctttcaagggcgtactgcgatgcgcggaaaacgccttgtgtccaggtctttacgaagaacttgtcgtgctcaaggttattctcgattgcccgggcaatagggagtgcctcgaccgagcaaatgatgaatacgtgggatgactgatgggcaggaagcaccatgtcgtttcgctggtgtagtcgatcgaccagttgccgagtgacctgtcgccaaaccgagggatacgcgtccgcaatggacttgaagtctgccgcgctgaccttcaagacaatcgagggctcggtggccagtacagtagcagagcgcttcgctgttgggaccagagcagccatttctccgacgtgatcgccgccccctcgtgttgcgacttcacgatcatggaccttcacctggaaatgccctgtgatgatgaaataaacctcggagtcctccgcgtcctcggtaatgagcacagcatccttagcgatctcctccagcgttcctacctctgcgaggcggcgtgctaggtcttgatttccgagtaccagcttctgctcaagcagtacttcctcaagaacggcgcggcctgacggcccttcaaagcgatcgatcaacttcccagtagtcatgatggtgagcattcccttgcgaagaggttgcgggggcgttcacagagaaatggggacgtgcgtcaccctttcaaggggcgctgaagaaaagatctgggcatggcgggcgctcagggacgcaggttcaaactctgtttgattgcattcgggagtagtgggccgaatgttcagtgtcaaacattttgtgctgtaagacctgacgtgctctggtacacctgtcaaaccttctcttgattggcgtcagtttttgtcaatcaatgggggtgagtttgacggtcaatggggagtcgccgaaatagcatcataggtagggattacgggcgatttggcggtgtcaatcgaaggaacgtaatttgatacctcacattattggccggacgacccgctggtggccgaggccactgcccgggccaagccacgcaagtagtcgacggcgctcagagcacccgggtcaggtcgtcgtcgaggaagtgccggaaactcaggcgctggccgtcggcgaagtcgaagtggctgtccagggtcgggccgttgaggacgaactccagggccagcaggcgcacaccgaccaggccgcgctgccggccgaggtcgtgcaggcggtactcgcccgggccttcgtcgttctcgcagggccgcggcgcttcgccgctgcgccagaacaccgtctcgccctcgaagtagaggcgataccagcgttgctcgaactgcaggtagaccacgttcaccggatcggccggacggccttcccaccaccattcctggatcagcagcgactggcagacctgtccgcgcagggcgggctgttcgccgttgatcgtgcagcaggggatggcggtatgcatcgggctcctcctccggggtcggttcacagcagggacaggtcggcgccgtcgctccgcaactggtcgtaggcctggtccaggcggtcgcgcagcgcttcggcgccgggaatgtggcgcgagacgatcatccgcagcggcaggcggtacagttcctggcttgccaacgcctggcggctggccgcttccaccggcgcctggtagtcgagcaggtagtcgccgcgcccgagttcgagcatgcgcaaggcggcgtggtgggtgccggtgcggtacaggcgcaggtgcaggttggggtcctggatgaagttggtgaccggtttccagtagctgtagccgctgatcaggatcagccggcgtccggccaggtcctggggaacccgcggtgccggctggtgcgccgggtagtacaggttcaggctgacgtggccgagcacgcgccgcgcctggagggtgtcggcggccagctccggcttggccgcgccggcccacagcgccacgctgccatcctgcagccccaggtacaggcgcgcgctgggcagggcgcggaacgccggacgatagccggcccgctccagcagcaggcggaccaggcgggcgccggaaccggcggcgtggccatcccgggcggtatagatgtagggggggaattcgtagtagccgacgttcaacgacggccttgcgtcctgcgcatggagctgcggggcggccagcagggcgaacgccagcagcgcgagcaggggcgttgtggtgcgtaggggcatggtgtgcggccttgccgttttttgttgttatgaatgggggcgaagcatgcggcgcgccgggccgcttgtccagcccggcgcgcgcccggtcaatggggcagcaggaagcgcgcggcgagcggcaggtggttggagatctgcagcgtatcgctgcgccggacccgggcatcgagacgggtcagcgaggggctgtggaacaggtagtcgagggtccgatccggcccctggacccgtgggtcgttggggaagtgcgtgtaccagcgaacctggtcgacgccactggcctcttccagcgacggcaccatcgggaagcgcccgctcaggatggccagttcgctgtcttcccggtagggcgcgcgcagcggcgccagcaggtagggatactggccgggcggcagcaggttgaggtcgccgccgagcagccagggcgtgcgcctggcctgcagttcgtcgagcagcgtacgggtggtctcgacctggcgctcgagggtgtcgtcgttcgcctgcgggcggtcgaagcgggcgttgagcacggccagctcgccgccgccgtcgatcggcaggtggctgaccaggatcgccgggcgcggcccgaacaggcggtcgaacagcccgccatcgcgtggcggcaactggcgccgctcggcgctatcgatgcgatagcggctcagggtggcctgcttgcggccgacgctgccgaagatgtgcggcgtcggcacgaaggccgacttccactcgtaggcctgggcgctgcaatggtagagatcgttgatgcgctcctggatcagcgccagttggtcctgatcgtcggtggcgctggagccatcgtcgatctcctggagcaggaccaggtccggctgctcgtcgcggatcacccggaccacctcgtcgagggtgaacgccaggtcttcggcggtggggcgctggtccgggccggtggcatccggcaggtcgtcccagaagacgtagcgcttgccggccaggtactggatgttccaggtcatcaccttcagggcctgccccggcttcagcgccggcgcggcgccctggcaatgcaggggcgcggcttcgcgatcggcgggttgccagctcagcaggtagctggcgagcagggcaccgccgaccagcaggagcaggccgacgaacagcaggttgcgtagacggggcagtgacatcgcaatcgagactatgctggaaaggaccagagcatagagcttgccgccgcgcatttcacccttgcaggtcgaattgacgcaagggttcgcgttttttcgagcgggagggtaccgcatgccgcgcaaggtattcagcagccaggcctaccgccacaaggtggtgctggtcagcggcggctgttccggcatcggtcgcgcgctggcgctgcgtttcgcccgggccggtgcgcgactggcgatcctcgacctcgaccaggcggcgctggacagtttggtccagcacctgcgcgaccatctcggcggcgaggcgctcggcctgcgctgcgacgtcgccgacgccgatgcggtggagcgtgccgtggcgctggcggtggagcgcttcggcggcatcgacgtgctggtcaacaacgccggcatcacccaccgcggtaccttcgccgaaaccggcctgggggttttccgcaaggtcatggcggtgaacttcttcggcgccgtgcattgcacccgcgcggcgctgccgagcctgctcgaacggcgcgggcagatcgtcgtgctcggttcgctgaccggtttcgccccgttgctctaccgcagcgcctacaacgccagcaagcatgccttgcacggtctgttcgataccctgcggatggagctggaaggcaccggcgtcagcgtgaccctggcctgcccgggattcaccgccaccgacctgcgcaagaacgcgctggtcggcgatggctcggtgactcgccagccggtgcaagtgctgggcagccaggtggcatcgccggtggaggtcgccgaggcgatcttccagggcgccgcgcggcgccggcgcctgctggtgctgtccaacgtcaactggcgggcgcggctgctggcgcgcttctttccgcgtctcttcgaaaagctgctggtgccgcgcctgtcgggactcaagccgcaaccctgacggtgctcagtgggcgtggtcgtgggcgtcgaagccctggctcatgtcccagtaggaggcctcgaccttgtgcccgtcgaggtcgcggatgaaacacccgtagtagggctcgccgtacagcggacgcgggcccggcgcgccctcgtcgcgtgcgccggcggccagggccgcggcgtggaaggcgtcgacctgggccttgctgtcggcgaagaagccgacgtggctgccgttgccgacgctggcgggacggccgtcgatcggcgcctgcacccagaactccggatagagcttgccgtaggctacggcgccggggtattcgaggatcaccttgcagccgagggcggccatcaccgcgtcgtagaaggctcgggcacggggaaagtcgttggtgccgatggacaggtgggaaatgcagctggggttggccgattcgtcgctcatggtccgttcctcgaggcagggctcgtcaagcataggccagcgcggcgaatcggcgcgcggcgccgttcacatcccgttgcgtggcgccggaccgaggctgtagatgcggaaggcgacgatggtcaacagcagctggaagaacccgctgagcgtatgcagggcgacccgcagcacgacggcgtcgccggccgaatcggcgagccaggcttccaggctccagaccggcagcaggatcaccagcgaacaggcgaggatcaggaagaatcgcccacgggtgaactcgaagctttcccgcagcgcctgcagcggactacggccgcgcagcaccaggcagaattcggcgaaggacagcttcaccatgacgaagatgcccggcaggatcagcagcgacaggccgagcacgatcagcagcgaagtcagcgccgcgagtagcgcgaaggctggccacaggcgcagcgcggcgctccacagctggccgacgcgaggccgctcgtcgcgcccgcgcgcgtccatgaacaggatcagggctgcggtgtagagcgggtagaagagcagtccggcgaccaggctccaggcgcccatctgctgggggccgacggcttcgtcgatctgctgctggagcaggctttcgaggaatatccagggcaggcagagcggcaccagggtggtcaggtggcgggtgaagaagaaccaggcgtcacgcagcggcagcagaggattcatcgcgggtcggcagatcggatacgagcccgcgactctaacccagccggccgccgaggccaacgcctggcggccgccgttgccgttcaggccgcttcgcgagcctgggcctgctccagttcgcggaccagcggcaacacgtgcttgccgaaatactccacttcttcgtggaagtgcaggaaggccgacagcaccaggtcgaccccggccgccttcagcgcgacgatgcgctcggcgatctgccgtggcgtgccgatcaggttggtcttgaagccgtcgttgtattgcaccaggtcttcgaaggtggatttggcccagttgccatcgccctccggcgaggccttgccggcctgtttcaccgcgtcgccgaaggcgttcaccgcctcgtagtcggccttggcgatgatctcgtcgagcaccgcccgcgcttcctcctcggtgtcgcgggcaatgatgaaggcgttcactccgaccttgaccgaatggccgttggccgccgccttggcgcggatgtcctcgacctgggcgcggatgccgtcgatgctgttgccgttggtgaagtaccagtcggacacgcgcgaggccatgtcccgcgccgcccgcgagctgccgccctggaagatttccgggtgcggctgctggatcggcttgggtttcagggtgtagtcgtggaaacgatagaaatcgcccttgaaggtgaagttttcctcggtccagatgcctttcagcacgcggatgaactcctcggagcgccgatagcgttcgtcgtgctccagccagggttcgccgatgccggtgaactctcccttgaaccagccgctgacgatgttcaccgcgacccggccattggtcagttggtcgatcgtcgccagttgcttggccaccaccgccggatgccaggggccaggcaggatcgccgcgatcaccttgagcttctcggtggccgccagcagggcgtggctgatggccaccgactcgtgctggtactcggcgccgtagccggcggtgaagcggatctgcgagagggcgtagtcgaagccgttgcgttccgccaactgggccagcttgcggttgtagtcgatgtcccagctggtgcgttgctcgatcttgctcaccaccaggccgccgctgacgttggggacccagtaggcgaagcggatcggctgttgctcttggctcatcgggggtatctccgggtaggggcgtggtccggtgtctatgaaggaaccgtgccatcccggattcatgttttcgaatcaatggcttatgggggatatggcggaaccggcctgtcttctgccggacagccctgttgtcccgctgttgcccggcagacagtcaggccggcaagcgctgcaacagttcggcggcgcgcagtaccacggcgtactcgccgtgcaggttggccaacgccatcgcatgcacctcgtcggcgctgcgcggggtgccgtggaaatcgggcttggcgaaggtgaagcaggcgtcggccactacccaggtctggaagccgaggttgccggcgctgcgtgcgctggcttccaccgagttctccgtggctaccccgacgagcgccacctggcggatgtcgcggacatggagccagcgttgcaggccgctgttgatgaaggcgtcgggaacgttcttctcgaacaccgcctcgtcgtcgcgcggcgccagcgctggctggaactccacgccaggctggccgggcgcgaagggcgagccgggctgccgggatacgtgccggacgtgcaccaccggccagccggcggcgcgccaggcggcaagcagttcgacgatgcgcgcctcggcgccgggattgttgcgcggcggcaggtcgtggcgctgcatgccgcgttgcaggtcgacgatcagcagggcgacctgggaccgtgcggagcgctgggcatcgtcattcatcgggaattcaccggaggaacttgagatcgtgcagggtgctccaatatttccctttggtgcaatccatccttccttctcgaaatgcagtcgaggcgtgcgatgaaatccgatgagaaaaccctgatcgacggcctgttcagccgcctgcgcgaggccgaggggcagtccgctccgcgtgacgccgaggccgaggcgcagatcaaccagcacctggtgcggcagccggcggcgccgtactacatggcgcaggtggtgctgatccaggaagccgcgctgaagcgcctcgaccaacgggtgaaggagctcgaggcgcaggtcgcccagttgcagcagagccgtccgagcagcggcggcttcctctccggcctgttcggcggcggcgcgcgcgacgagccggcgccgagccaatcggggcgcccggcgggctggggcgagacgcgtttctccaatccggcggcggcggccggcgacatgcgcccgggtatggcgcccgccgcggcggccgcgccttcgcgggccagcggctttctcggcggcgcgctgcagacggccgccggggtcgctggcgggatgctggtggccgacctgctcaccggcatgttccgccacagccagccgcaggaaatcgtcgaggtgatccaggacgtcccggtggataacctcgacgccagccagtttgccgatcccgagccggcgcccgagcgcttcgccgatagcgactatcccgccgacggcggtttcgccgatggcgatttcagcgacagcgacttcaacgacgactccagcttcctcggcgacgacgatttgttcacctgaccgttagggttgcgggccgtgggctgcgataatggtggcccactgccgtcgttccggagttccccttgagtcgtcccgagtcgcccgcggcgaagaagatcgctgtcttcgccgatgtgcagaacctctactacaccgtgcgccaggcctacggctgccatctcaactacgccgccctgtgggcagacatcgctcgcggcgggagcatcgccgaggcctatgcctacgccatcgaccgcggcgacccgcgtcagcagcagtttcagcagattctgcgcaacctcggtttcacggtgaagctgaagccctacatccagcgtgccgacggctcggccaagggtgactgggatgtcggcatcaccatcgacgtactggatgccgcgccacgggtggacgaagtggtgctgctgtccggtgacggcgacttcgatctgctgctggagaaggtcatccgcgcccacggcgtcgtggctacggcctacggggtgcctggcctgaccgccaacgcgctgatccgagcggcgtcgcgctacgtgccgatcgagggcggactgctgctcaagggctgaccggccgcgctccagaggacgatgggagacggcgaatccgctagaatgccgtccgtttccttttttccgagtcgctcatgacgttcgcttccctcggtctgctcgaccccctgctcaaggccctcgaagggctcggccacggcacgcctacgccgatccaggcccaagccatacccccggcgctcaagggccgcgacctgctcgccgcagcacagaccggcaccggcaagaccgccggtttcgccctgccgttgctgcagcggctgaccctggaggggccgcaggtcgctgcgaactcggtgcgcgcactggtcctggttccgacccgcgaactggccgagcaggtccacgccagcgtccgcgactacggccagcacctgccgctgcgtaccgcggtggcctacggtggggtcagcatcaacccgcagatgatgaagctgcgcaagggagtggatatcctcgtcgccactcccgggcggctgctcgacctgtatcggcagaacgcggtgaagttcgcccagctccaggcgttggtgctggacgaagccgatcgcatgctcgacctcggtttcgcccgcgagctggacgaactgttcgtcgcgctgccgcgcaagcgccagaccctgctgttttccgcgaccttctccgacgccatccgcacgctggcccgtgaactgctgcgcgacccgctgtccatcgaggtcagtccgcgcaataccgcggcgaagagcgtcaggcaatggctggtgccggtggacaagaagcgcaaggccgagctgttctgccacctgttgcaggccaatcgctggcgccaggcgctggtcttcgccaagacccgcaagagcgtcgaggaactggtcggactgttgcagcggcagggtatcgccgccgactcgatccatggcgacaagccgcagccggcgcggctgcgcgccttgcagcggttcaaggccggcgaggtagacctgctggtagccaccgacgtggccgcgcgtggcctggatatcgaggaaatgccgctggtggtcaacttcgacctgccgatcgtcgccgaggactacgtgcatcgcatcggccgtaccggccgtgccggtgcctccggccaggcggtgtcgctggtctgcgccgacgaagtggagctgctggcggcgatcgaaacactgatcgggcagaccctgcaacgccgcgaggagcccgacttcgagccggagcaccgggtgccgcagaccgcaccgggcggcgtggtgctgaagaaaccgaagaagccgaagaaacccaaggccgcggagagcgtcggcaagcccggcaagatccacttgggcagttggttcgacagcagcgcgccgacggtcaaggcggtgcgcaaggcaccgggcttcggcgcgggtgcggcgggcaagccgaagaagcggccgtccggcaaatagcgaggcgctggcgtaccggtctctagcgcctgccgcgcaaccaggccagcgcgccgagtccggccacgcgcccgctggcgaagcaggcggtcaacaggtagccgccggtgggcgcctcccagtcgagcatttccccagcgcagaacacgccgggcagaccatcgagcatcaggttgcggtcgagcgcctcgaagcgtacgccgccggcgctgctgatcgcttcgtccagcggacgcgggcgcagcagcgtcagcggcaggcgcttgatcgccgccgccaggcgggccggctcggtataggtggcggcgggggtgagttcacgcaggaggccggcccgaaccccatcgatgcccaactggctgcgcaggtgattggccatcgacctggaaccgcgcgggcgagccagggctgcctcgatctgctcgcgacgcctgttcggcaacaggtccagccatacttcggccgagccccgtgcctcgatccgttcgcggatggcggcggagagggcatagaccaggctgccctcgataccgtcgcgggtcacgacgaattcgccctggcgcggcgtttcgcccgccagtcccatggccaccggtttgaccggagcgccggagaacttgtcgcgaaacagctcgctccagccgtcgatctcgaaaccgcaattgcttggccgcaggggctcgacctcgatgccacgggcgcgcagcaggggcacccaggcgccgtcggagcccaggcgctgccaactgccgccaccgagcgccaggatcacggcgtcggcgcgtatcgacaggcgctcggcggcgctctggatgtccagcgtaccgtccgcgttccagcccagccaacggcagcgggtgtggatgagcacgccttgctcgcgcaggcgcttgagccaggcacggagcaacggcgcggccttcatgtcggaggggaacacccggccggaactgccgacgaaggtgtcgatacccaggccgtggatccaggcgcgcaacgcatccgcgtcgaattcgccgagcagtgcggcgatttccttctggcgcctgccatagcggccgaggaattgttccctggcctcggcatgggtgatgttcatgccgccgacgcccgcgaggaggaatttccggccgaccgagggcatggcgtcgaacacttccgtgcgtacgcccgcctggctcaggacctccgcggccatcaggcctgcgggaccgccgccgacgatggcgacctggggggaaggggaggatgcttgactgggcatgtggacgacgagcgagacctggggaaaccggcgtgcagtgtaaccgaggcgaagaccgcctccgagccttgtcgatgccacctggtccgctcgccgtgcgcctggtcaggaactgatcaaccgtcgcaaggccaggcacgatgcgctgcgcgaagcgtttttcgcaccttatccacaggcggttccacacgctttgtggaaatccgccgacgctcgtcgcgtggcaggaacggcttccggtcgcgcttgcccgaaggtgccctaggccttggcttcgacagccaagcgccaggtcagtggatcagcgaattgcgcttggcgaactctgcgaggtcgaccagcgaacccaggccgagcttctgcagcaggcgggtcttgtaggtgctgacggtcttgttgctgaggaacagcttctcgccgatggccttgttcgaatagcccatggcgagatgctggaggacgatcatctcgcggtcggagagcaggccgataagctcgctttcggaaatgcgttccggcggggtgccgagggtatcgaacgtgagcgaaggaaagaacgtgtagccagcggtcaccgcgttcagggcgttgatcaggttgttcaggtcttcttccttgttgacgaacccacgggcaccgacctggatgcagcgcttgcagaacgcctctgcggattgcgaagtgagtaccagcacctggctacgcagtcccagggacttgatccgcgagatcacggtcaggccatcgagtttgggaatgccgatgtcgagaatcaccacgtccggttcgtgctcccggaccaactggatggcatccacgccattgtccgtctcggcgaccacctgcagaccatgcttttccagcaggacgcgcacggcgagacggatgacggggtggtcgtcgacgatcaggacggtatgcataaattcgatttaccttgagggaccgggacagggtcgggattcgatttcccgggcgctgccgccggtggtcatccatgttgggcgctaggccgagatcgccgtccagaatagcctgttaaggcggggcgactcggtttttcatgtggaaccatgctaatccaaccgaacctccaaatcagtaggaaaattcccacaaaacatggggacttgtcccataggtctagtaagggaaacacagcagtatatcgccggtatttcctggaaaccctgtgtggaccgtgatgaatgatttgaatgttctggtgttggaggatgagccttttcagcgcctggtagccgtcacagccctgaagaaagtggtgcccggatcgatcctcgaggcggcggacggcaaggaggcggtggcgatcctggagtcctgcggacacgtcgacatcgccatctgcgacctgcagatgagcggcatggacggcctggcgttccttcgccacgcaagcctgagcggcaaggtccattcggtgatcctcagcagcgaggtggatcccatcctgcgccaggccaccatttcgatgatcgagtgcctgggcctcaattttctcggcgacctcggcaagccattcagcctggagcggatcaccgccctgttgacccgctacaacgctcgtcgccaggacctgccgcgacagatcgaagtcgccgagctgccctccgtggcggacgtggtgcgcggcctcgacaacggcgagttcgaagcctactaccagcccaaggtggccctggatggcggcggcctgatcggcgccgaggtcctggcacgctggaaccacccgcatctcggcgtattgccgccgtcgcatttcctctatgtgatggaaacctacaacctggtcgacaagctgttctggcaactgttcagccaggggctggcgacgcgcaggaagctggcgcagttggggcagccgatcaacctggcgttcaacgtccatccttcgcaactgggttcgcgtgccctggccgagaacatctcggcgttgctgaccgagttccacctgccgcccagttcggtgatgttcgagatcaccgagaccgggttgatcagcgctcctgccagcagcctggagaacctcgtgcgtctgcggatcatgggctgcggcctggcgatggacgatttcggcgccggctattcgtccctcgaccggctctgcgagtttcccttcagccagatcaagctggacagaaccttcgtccagaagatgaagacccagcccaggagttgcgccgtcatcagcagtgtcgtggcgttggcgcaggcgctgggaatttccctggtggtggaaggggtggagagcgacgaacaacgggtacgcctgatcgaactcggttgctccatagcccagggctacctgttcgcccggccgatgccggaacagcactttctcgactattgctccggatcctgacgccgccgccctggcctcggctgcctctagccgaacgccgggcctcgcgccggacgcgtttcctttctaaacaactgccggccctgccgcacagacctttcatgcgatcaaaactattcctgctgttcttctgcctgctgctgtcgggcggacgcctgttcgccgtcgaagcgcatccgtccctgacgctgttcagccagttgcgcatcgagcacgaggacatggcgatcgccgaggacgactgggcctggctgcgccacaagggtcacctgaggctcggcgcggcgctggacgagacctcgcccttcaacgtccggctcgacgacgagaactacgaaggcataacggcggacgtcgccacgctggtcgggcagttgctcggcatgcgcatcaaggtcgtgagcttcgatacccatgcggatgccgtggcggcgctcgctgccggaaagatcgacctgcttggcagccattacagctcggcgggtgattcctccctggtgctcagccaaccctatgcccgtgatcgattggcggtgttcaagcggatgggggaaaagcgcaactcaccggaggatctcgccggactcagcgtggcggtggcccgggagcatgtcggggaattgcgccagcgtttcccgcgggcgcgtttcgtggtcttcggcagccatgacgaggccgttgccgcggtggctttcggacataccgacctgtatctcgacgatgtgctcagcgcctaccaccggatcaatcggtcctattacggctacgtgaggttcgagcggtttgccgatgcccgcctggaagggggctacggcttcctccttcgtcgcggcgacacgaacctgttgcgcgtcgtcaactcggccatcggcgcgatcaaccaggaccgtctcgaaagcatcgccaggcgctgggtcggcagcggttccctgccaacgggccagcgtatcgcgctgacgccgcaggagagtcgctggatcgctcgccacccggtggtgcggttggtcatcaacgacgacctggcgccgctggccttcttcaattccgacgagaccttctcgggcatcgcctccgacctgctggacatgatttcccgccgcaccggcctgcatttccaggtcacgcctcgcagtggcggcttccccgagcagatcggcgtattggccaggaaggaggcggacctggcgatcatgagccgcagcagcaagcgcgaggaaatgctgcgtttcacccgctcgttcctgtccacctcgtacgtcctcgtcacccgggcggacgacaagggacgcgcggagagccccggaagcctcgacggcaagcgcatagcgattcccgccggccatgtgggcatgcaacaggtgcgcgagcgctatccgcaggcctcgatggtggaggtcggcgtcgcgctggatgccatgaacctggtctacgaaggacgggccgacgcggcggtggtgccgctggtcaccgctcgctactacatcgtccggttgttccgcgagaggctggcgatcgccgacctggttcccatcggtgcggccaccgcccacttcgccgttcgccgaggcgacgccgaactccagtcgattctcgacaaggccttgctgagcatctcgccggacgacctgagcgatatcgtcaatcgctggcgctcgccgccgggaatgagcggccagacctgggtcgactacatcctggtgatcaccgagatcctggcgatcgcagcggccttgctgctgctctgcctgggctgggtcacttatcagcgccggcagatcagggtgcgcgcgcgggtcgaacaggcgctcagcgaccagttgcggttcgtcgaggccctgaccgactgcatgcctccgccgctgtatgtgcgcgatgtcaacggacggatgctgtcctgcaaccgcagctacctgcagagcgtcggcttgagttccgaggaggtgatgaaccgcaccgtgctcgaactgcccatggaaaacttcgagaccgctccggagttccatcgcagctacctgatggccatgcgcgagggcaggaccatcgaggcggtctacccggtggcgctgggcggtcgggagcgctggatcgaccactggatccagccgttccgcgattccagcgggaccatccgcggtgtcatctgtggctggctggacatcaccgagcaccgccagttgatcgatgagctggaagaggcaaagaatctggccgacgaagcgagccgggccaagaccaccttcctggcgaccatgagccacgagatacgcacgccgatgaacgcggtgatcggtatcctcgaactggcgctcaagcgtgccgagaccggtcgggtggaccgttccagcatcgagatcgcctatgcctcggcgaagagcctgctggagctgatcggcgatattctcgacatcgcccgcatcgagtcaggtcgcctcagcctgtcgccgaaacgggccaacctgcgcgagctggtggaatcggtggcacgggtattcgaaggcctggcccggcaaaagcgcctgagcctggtgctggagatcgattcgagcatcaacggcgacgtactgctggatgccatgcgcttcaagcagatcctctccaacctggtcagcaacgcgatcaagttcaccgacgagggctcgatccgcatccgcatcgatggccgccaggtggagccgtcgctgttgcaggtcaatctctgtgtggaagacaccggcatcggtatttccctgggcgaccagcagcagttgttccggcctttcgcccaggtcaaccgcaacctgcagaacaccgagggcaccgggctcggcctggtgatctcgcgctcgctgtgcgaaatgatgggagggcgcctggtgatgagcagcgagctggggcagggtacgcggatcgacgtcgagctgcgcctgcaggtgctggaaccgatcgtcgagaacgtgcgggcgatcccgctcggcagtcgccaggcgcggcggttgcaggtgctggtggtggacgatcatgcggtcaaccggcagatcctccatcaacagctgagcttcctcggtcatgacgtggaggaagcggagaacggcctgagcgctctcaacctgtggcatgggcaaccgttcgacatggtcatcaccgactgccacatgccgctgatgagcggctccgaccttgcccgctcgatccgccaggaggagcgcgagaatggcgaggagccggtggtcatcatcggcctcaccgcggacgcccagccggaggagatcgagcgctgcatccaggctggaatgaacgagtgcctgatcaagcccatcggcctcgatgtcctcgaggagcgcctgctggccctgggcttcgccgccgacgagctgcccgtcaccatcgatgccgaacccgtcgccataccgacggccccccgtctctacgacctggattccctgcatgcgctgaccggcggcgagccgacgatgctcaggcggctgctcgacgaactgctgaccagcaaccgcaaggacctggagaccctcgagggactggtgcaacgccaggagaccggcgaactggccgagctggcgcatcggatcaagggcgcggcgagggtggtgcgtggcgagcaactggtggaaagctgccggcgcctcgaggatgcctgcctcagcccgaacgcctcgttcgcctgggtggaagagtgcgccgttggggtgaaactggcgatcctcgccctggacgaaagcctggtggaagagtgcacggattgacgtggcccgcgcccgttgcccgggcggtaaaccaatcgtcatcgctttgcccgaggatcgggcatgtccaggcgcggaaaagactacactccggttggggagccttttccgcggagcctgaccaaagatcggaataccgccctcgcgggcaccccagccgattcctgcggtcagatagtccttctggagtgcgttgaacgaaaggaaccaagcgatggccgacctgaccagcctgagcatcgagcatcttcgctcgccacggctgtatacccaccgtctgatcctgcggccctggctggtgcaggaccgggccaggttcgccgagctgaatgccgatccactggtgatggagttctttccgtcctgcctggatcgtgcccagagcgacgcgttgctgcgccgcatcgacgcgcacttcgccgagcacggttttggctggtgggcgctgcaggtcaagggcggtgatcctttcatcggctacgtggggctggaggtcgtggacttcgatgcgcccttcgtacccgcggtggccatcggctggcgtctcgccgccgagcattgggcggagggcttcgcccacgaggcggccgaggcggcgctgagctacgccttcgatacccttggcctggaccaggtggtggctttcaccgtaccggccaacgagaactccctggggctgatggagcgcctggggatgcatcgcgatcccaccgacgacttcgagcatcccgacctgcctcccggccaccgcttgcggcatcatgtgctgtaccggttgacgcgcgaggactggcttcgcagatgagtcggccgtttccgaaaaggcctcccatgaacgcgaaccttcccccttccgccatttccgaactgcatggcccgcgcctgctgctgcgcgcctggcgcgacagcgaccgcgaggcgttcgccgagatgtgcgccgacccgcaggtaatggaattcttccccagtgtgctcgaccgcgcgcagagcgacgccttggtcgatcgcgtccaggcgcattttgccgagcgtggctacgggccctgggccctggagctaccgggcgaggcggcgttcatcggattcaccggcctgttcgacgtgaccatggacgtgcacttcgccccgaccgtggagatcggctggcgcctggcgcccgcctactggggccgtggactcgcccgcgaagcggcggaaaccgccttggacttcgccttcgagcggctgcgcctgcccgaggtggtggccttcaccacgccgcccaaccgccgctcctggggcttgatggagcgcctgggcatgcgtcgcgatccggccgaggatttcgaccacccactcctggcagcggatcacccgatgcgccggcatatcctctatcgcgtcgacgcggcccgctgggcggagcggtgaacatgggcgacggcggcggcgaggtgctctcctaccatcgcctcagcatgcatcgcccggagcgctacgcacccggtcccggcggactggactgggcgacccagccggcgccgttccgccagtaccggggctgccggcaaatcgaactgctgcatcggccgctggaggagtcgccaccctacgacggggtgttttccgggccggcggccgcgccctctcggctcgatcgccgcagcctctcgcagatgctctacgacggattggcgctgtcggcctggaaggaggccggcggcactcgctgggcgctgcgggtcaatccgtcgagcggcaacctgcatcccaccgaagcctacctgctgcttcccggcggtaccctggagccggcgccgctgctcgcccactaccgtcccgacaagcatgccctggaggtgcgcggcgaactgccggcgccgctggcttcgctgctggatgactgcttgccgcccggcggctgcctcctggcattgaccagcgtgccctggcgcgaggcctggaaatacggtgagcgagcctatcgctactgccagcatgacctcggccacgcgctggcctgcctctcgatcgccgcggcgatccagggctgggagatgcgcctgctgcgcggcgtcgccgaaagtgcactggacggcctgttcggccttgaccgggacggcttcgccgagtgcgagagcgtcgacgcactgttctggatcgggccggcgctcacgcaggagccttccctttcgccgcgcctgtgcgaaggactggcggccctgccgttggccggcgcgccgaaccggctgtcgcgggagtaccgggactggccggagttgcagcggatacatgggctatgtcgggcgccgcgcctgccggcacgcccgtggagggtcgcaccgggcgagcccggcaacgacaaccccggcctgccgctgcgaccgctgctgcatcggcggcgtagcgcgcagcgcatggacgggcgcgccggcatcgatgtcgggctgctgcgggcctggctgcgcaggctgctgccggagcgctcgccggtgcctttcgcggtcaccggcgaggccgcgcgggtcgatctgctgctgttcgtccatcgcgtccggggcctggtgccggggttgtactggctggaccgcagcggcctgcggcggccgccgatgcgcgaggacttcctctggcagcacgtcgatccggagttgccgctgtacctgttgcaggaaggcgatgcacgcgcgctgtcggcgtatctctcctgccagcaggacatcgccggcgacggctgcgtcgcgctcgccatgctcgcccatctcggcgcggcgctcgaagaaggtccctggtgctatccgcggctgtactgggaatgcgggcaggtcggccagttgctctacctcgaggcggaggccgccgggctgtctgggacgggtatcggctgctactacgaccccctggtgcatgagctgcttggactaacggatgagtccatggccagtctctaccatttcaccctcggccgcgcggtgtgggacactcgtctttgcaacatgcccgcgtacccggccatgcgccgcgactagcccgtcgacagcccgaattcgaggaaacaccccatgacccagatactggacaacctggtggctttgctgagcctggaacccatcgaggagaacctgttccggggcatgagccaggatctcggcttccgccagctctatggcggccaggtcctggggcaggcgctgtcggcggccagccagacggtggaggacgatcgccacgtacactccatgcacggctacttcctgcgtcccggcgacgccagcatgccggtggtgtaccaggtggaccgggtgcgcgacggcggcagcttcagcacccgccgggtcaccgcgatccagaaaggccagccgatcttcaccctgagcagctccttccagtacgacgaggaaggtttccaccaccagatcgagatgcccgaggtggttggcccggataatctgccttcggaactggagctgacccgccagcgcgccgagcggattcccgagcgcatccgcgacaagctgctgtatccgaagcccatcgagattcgtccggtcacccagcacgacccctacgacccgcagcccgacgaaccggtgaagtacctctggttccgtgccgacggcaagctgccggacgtcccggcgctgcacaagtacctgctggcctacgcctcggacttcggtttccttaccacctcgatgcagccccatgccgtttcggtgtggcagaagaccatgcaggtcgccagcctcgaccacgccctgtggttccaccgcgacctgcgcgcggacgagtggctgctctacgccatcgacagcccctgggccggcaacgcacgcggtttcgtgcgcggcagcatcttcaaccagagcggccagctggtcgcctcgtcgagccaggaaggcctgatccgcaagcgtgaggactgggcgtgaggctggccgacatccgccactgggtgttcgacatggacggcaccctgacccgggccgtgcacgacttcccggcgatccgccgagcgctggacatccccgagcaggacgacatcctgctgcacctcgccgccctgcccgaggccgaggcggcggccaagcacgcctggctgctcgaacacgagcgcgccctggccgaggccgcgcggccggcgccgggcgcactggaactggtgcgcgagttgcagcggcgcggcgtgcgcctgggcatcctgacccgcaacgaccaccagttggcgctgatcaccctcgaagcgatcggcctgggcggctgcttccccaccgagcacatcctcgggcgcggcgaggcgcggcccaagccggaccctgatggcttgctgcgcatcgcccgacgctggaacgtgacgccggcggagctggtgatggtcggcgactaccgtttcgacctcgactgcggacgcgccgcgggtagtcgcacggtgctggtcaacctgccggaaaacccctggccggagctggccgactggcacgctgccgattgccatgcgttgctcgagcaactgcaaacgccgtaggaatatccggcggaaaacctcgagggcggcagcgccagcggctccccgaaaacgaaaaaagcgcaggaggccaggctcctgcgcttttttcctgcgcatccgtgcgggatgcggcggccgttatcagccgttgatcgcgtcggtcagtgccttggccggaacgaacttggctacacgcttggcagcgatctcgatcgccttgccggtctgcgggttgcggccggtgcgcgcgggacgctcggagaccttcagcttgccgatacccggcagggtgatttcgccatcgttctccagggcgtccttgacgatctcggcgagctggtcgagcgcgctgcgaacggtggtcttctgcgcgtcgatggcttcggcgatgtcctggatcagttggtctttggtcagtgccatggtggtgtagctccttggtaaaagactgcgcgaggggcctcgcacagaaacgggcgtgattttaaacagcttggcgcgaataaggttcccttttctccgcttatttgtttcctcgcacgacgcgcatgacagagccgttacagaggttttcgcggctatccggaatgatgccggcgtcggttgcccgacgcatcctcatggttctgccaggggcgcatgcctccggttcttagttaaggattattggttatttataggttaggatttcatccattaaggttataagcaggacatcccgtccctttccatcaccggagcctgcttacctcgcgccaacgcctggccctcgctccccgttcgaggtgccgcatgagcgaagcccggctccactcgcccgaccccaggacaccgcgacccatggccggttgggcggcaagcctgcgcgacagtggactgctggcgctggcagtgccgcgcgtgttcgccggcatggagcgggactggggggaaatcttcgctggcgtccgccacctggccgagcaggaactcgagctggcacggcgcctggccctgcatcatctgcagatcgcttccattcgcctgctgggtagtcctgaacagcagcgccgcctgttgccggccagcgtcgagcgccgctggctgtggagcgaggcggtcgatctgcggcgcgcccagcccgaagcgcaggagcactggcggggcggtttcctggtgggtggacggggtagcgattgcttcgccgtggaagacgtggatcgcttgctgatctcagcctggcacgcgccctcccgcgctcacctgatcgctgtcgccgaaacggggcgggcaggcatcgacatctccggcctcgccgatggctcggggctgttcttgcccgccgggcagcggctgcattaccagcggctgcggctgcatcccgaggacatcctggtgccgcccggcctgccgccgaccccgtgcgggcaactgcgcgaaggcttgacccgattggcccaggccaacctcgacctgggccaggctgcgcgggtgccgggcgacgtggcggggcagggagaggcgccgcgtctcctcgccctcgcgctgcgtcttgtcgaactggcggcggagtccttccaggcggcattcgcccgcggcggcgcgctgacattccgcgaaagcgcggcggcgtcgctgctggcgagcgaggcggaggcggtggcccgcgccgggctgctcgcctgcctgcgccgacaggccctggaagcccgtttgctgggcgcggccctgtagggacgggggcatggagcaagggcggaatggcatccgggggcgcattcgcgctcataaactaattccaaaatattatttatatcgcgttttttatatctgtaatctgcatcgcaccggaccaccggactcgctgtcgccacccattgcccgtccctggtccgttctcctccggagcgcggcaccgttgcctccgaggttcgcccgatgaaacgcccgaattccctgcaccgcctggtggcagccctggcctttgccagcctttctgtcgccgcccaggccgccgacatcacggtcggctaccagaccggcatcgacccgaccaaggtgccccaggccgatggcctgtacgagaaagccatcggcgagaagatcgactggcgccgcttcaacagcggtccggaagtgatcgccgcgctcgcctccggagacctgcaactcggcaacatcgggtccagcccgctggcagcggcgacctcgcggaagctgccgatcgtcgccttcatcgtttccgcgcagatcaacgccgccgaggcgctggtggtgcgcaatggaagcgggatcgggaaacccgaggacctggccggcaagaccatcgctaccccgttcgtttcaacctcccactacagcctgctcggcgccctcaagcactggcagatcgatccgtccaaggtgaagatcgtcaacctcaacccggccgagatcgctgccgcctggcgtcgcggcgacatcgacggggccttcgtctggtcgccggcgctgggcgagatcaagaaaagcggcaaggtcctcaccgacgccgccgaagtcggccagtggggtgcaccgacattcgaggtgtgggtggcgcgcaaggacttcgccgagaagcatcctgaaatcgtcgcccgcttcgcccgcgtcagcctcgattccttcgccgactacaacgcgcacaaggccgaatggaccgccgactccgagccggtgaagaagatcgcccggctgaccggcgccgatcccagggacgtccccgaactgctggccggctcgaccttcccggaaagccaggcgcaactgtccgccgacctgctcggcggcggcaccgccaaggctatcgccggcactgccgaattcctcaaggaacagaagcgcgtgccggccgtcctcggcgactactcgccctacgtcagcgccgacttcgtgcgccaggcggagcaggtccaggtcggccagcgctgaattccgcgcctccgctccggcctgtcggagcggaggctttctcaccctacggagggcagaacacatgagccgtctgacggccgaggcgatcagcctctcattcgaacagcgcggccagcgtcgcgccatcctccgcgatctcagcctgggcctggccaagggcgagtcgctggtggtgctgggtccttcgggctgcggcaagtcgacactgctgaacatccttgccggtttccagaagccggaccagggacgcgtgcagatcgacggccggacactcgaagggcctggcggcgagcgcggcgtggtattccaggacgacgccctgatgccctggctcaacgccctcgacaacgtcgccctgggcctgcgcatccgtggcctgggcaaggccgagcgcaccgcgcgggcgcgccaggtcctgcaacttgtgggcctccaggagtacgccgagcagtccgtcgctcagctctccggcggccagcggcaacgcctcgggctggcacgcgcgctggcggtcgagccggacttcctgctgctcgacgagccgttcggcgcgctcgacgcgctgacccgcgagcgcatgcaggtgctcctgctggacctgtggaagcagaccggcaagggcctcttcctgatcacccacagcgtcgacgaagccctgttcctggctaccgacctggtggtgatggacggcccgccggcgcgcatcgtcaagcgcctgccggtggacttcgcgcggcgttacgccgccggcgaaacggtgcgttcgatcaaggctgatcccgagttcggccgtttgcgccaggcgttgctggacgaattcctcgatgtcgcggaggccgaacatgcccactgataccctcggactcgccgttgccaatcctgtcccgcgcaagcgccgtctgcccggcgaccgtcggcgctgggccgccggtgccagcgtgctggccctggccctgctgtggtgggcggcgacccgtttcggctgggtcgacgtgctgttcctgccggcgcccgaacagctcttcgaagccctgcaacggctatggcaggagggctacctcgatgccagcctgctgcaacacgtcggcaccagcctgctgcgggtgctcctggcgctcggcgcggcggtgctgacggcgatcccgctgggcgtgctgatgggcctcaatcccttggccggagcggccctcgatccgctggtggagttctaccggccgatcccgccgttggcctacctgccgttgatcgtcatctggttcggcatcggcgagctgagcaaggtgctgctgatctacctggcgctgttcgcgccgctgctgatcgctaccgccgccggcgtgcgtcgcgtagaccgatcgcgggtgcaggcggtgcgctgcctgggggccagccgctggcaggtggtgcgctacgtgatcctgccgagtgccttgccggaggtcctcaccggcctgcgcatcgccctcggcgtcggctggtcgaccctggtcgccgccgagctgatcgcggccaaccgaggcctcggcttcatggtccagtccgccgcgcaattcctcgccaccgacgtggtggtggtcggcatcctgctgatcgccgccatcgccctggccttcgaactggggctgcgctgggtccagcggcgcttcgccgcctggggttgagcgcgagagtcccgagtcatttccgaaccggccttcactcacgcggcgaaggccggagcgagggcgcgcagggcgcgcccgcaacctgcccgacgagtagcacgacatgagcctgaccatccaacccatcagcccggccctgggcgccatcgtttccggcatcgacctcggcgcgccgctggacgacaccggccagcgggccatcgagcaggccctgctcgaacaccaggtgctgttcttccgcgaccagtcgctggaacccaggagccaggcgcgcttcgccgcccgcttcggcgacctgcacatccatcctatctaccccagcgtgccggagcagccggaggtcatcgtcctcgacactgcggtcaccgacgtgcgcgacaatgccatctggcacactgacgtgaccttcctcgagaccccggcgctgggagccgtgctcgccgccaagcaattgccgccgtacggcggcgacaccctctgggcgagcagcacggcggcctacgaggcgctgtcggcgccgctgcggcgtctgctggacggcctcacggcgacccacgacatcggcaagtccttcccccgcgaacgcttcggcgtcaccgaggccgacctggcgcgcctggaggaggcccgcctgaagaatccgccgcgctcgcatccggtggtgcgcacccatccggtcaccgggcgcaagggcctgtttgtcagcgatggctttaccacccgcatcaacgaactggagccggccgagagcgatgcgctgctgaagttcctcttcgcccatgccacgcgacctgaattcaccgtgcgctggcgctggcaggaaaacgacgtggcgttctgggacaaccgcgtgacgcagcactacgcggtggacgattaccggccacagcggcgggtcatgcatcgcgccaccatcctcggcgacaagcccttctgacgacgccgcgcgcgggcttcctccggcggcccgcgccggcaactgtccgttccgccagcttttgctctcgaaaaggtcgcctctgcgacattcgctgtcgtgtcccggcgtgccgctctcgcctaagcttggcgggtccaattgtttcgagagttttcatccatgcaagaacgcatcccggatgagctgaccctgccagagctcaccctgcgtggcctgatcctcggtgcgctgatcaccgtggtcttcaccgcctccaacgtctacctcggtctgaaggtcggcctgaccttcgcctcgtcgatcccggcggcggtgatctcgatggccgtcctgcgctacttctccggcgccaacatcctcgagaacaacatggtgcagacccaggcctcggcggccggcactctgtcctcgatcatcttcatccttcccggcctgctgatgatcggctactggagtggcttcccgttctggcagaccgcggcgatctgctccatcggcggcattctcggggtgctctataccattccgctgcgccgggtgatggtggtgcagagcgaactgccgtatccggaaggggtggcggcggcggaaatcctccgggtcggcagcgacggcgccgaggacgaggaagacgcccgcgcgccgcgtgccgccggtaacgcgccggggctctacgacatcctcggcggcggcctggtggcggcgctgttcagcctctggagcagcggcttcaaggttctcgccgaaggcttcagcgtctggctcagtgccgggcaggcggcgttccgcctttccaccggtttttccctggcgctggtcggtgccggctacctgatgggcatcaccgccggcatcgcgatcctcatcggcgtggtgatctcctggggcgtcgcggtgccgctgctgaccgtcaacagcgtgccggccgacggccagagcctgtcggacctggccacccaactgtggagttcgcaggtgcgcttcctcggcgccggcaccatcggcgtggccgcgctgtggaccctggcgaccctgttcaagccgatggtgcggggcgtctgggcctccctcggggcagtgcgcggcaatagccaggcgaacagcctgcgcaccgagctggacatgccggccaagtggatcctgctgatcgccgggatactgctggtctcgctgttcgtggtcttcagccacttcctcggtgccgccgcgccggacatggccagcccgcagttctggaacctggtggcggtatgcgtggtgttcgccttcttcttcggcttcctgatcgccgccgcctgcggctacatggccggcctggtcggttcgtcgagcagtccgatctcggggatcgggatcatcgcggtcatcctggtgtcgttgctgatactcggcttcggcagcatcgagggcggcctgctggaccgccagaacggcaagctggcgatcgccctggcgctgtttaccacctcggtggtgctggccatcgcggcgatctccaacgacaacctgcaggacctcaagaccggctacctggtcggcgccacgccctggcgccagcaggtcgcgctgatcgtcggctgcatcgtcggcgcactggtgatccccccggtgctggaactgctctacagcgcctacggcttcaccggggccctgccgcgcgagggaatggaccccggccaggccctggccgcgccgcaggcgaccctgatgacggcgatcgccagcgggattttccacgacgcgctgaactggaacatgattctcatcggcgtcgccctgggcatcgccctgatcctcgtcgacctgctcctgcgccgtaccggcaaggcctgcctgccggtgctggcggtgggcctggggatctacctgccgccgaccatcggcatgaccctggtggtcggtgcgctgatttcctggctgctggaaaatgccctgaagaagcgtgcggcggcggccggggtcgacgaagaggcttatgccgaagagccgaagcgacgcggcgtgctgctggcttcggggctgatcgtcggcgagagcctgatgggcatcctgctcgccggggtgatcggcgccaccggcgaggacgcgccgctggcgctggccggcgccggcttcgcgggcatcgcccaatggctgggactggtggtattcgtcgcgatctgcgtgctgttctaccggcgagtgctggcgcgctgagggattcgtggctgcacggggaggggatgttgccgctagcgtcattccctgcggtcagggacggaggatgagggaaggggcgccctgcgcgcccccttttcctgcactcaacgcaccaggtgcaggaactgcaggtgccgctcgtactggtcgagcatgtcgttgatgatctgctccttggtgtagcccatcagatcgtagtcctggctaccttcggcgagatgcacctcggcacggaagtagcggcgattcttcaggtgcaggccgcccatgccggcacgcgcgaaggacggcgtgaagtagccgcgcatcagcacctggtagaggaaccgatgctgctcgccatgaccgatctccaggctcagcgaggcgttgcccgggtcgagctgggcgtccaccgccaggcctttctcgcggaacacctcggaaacctcgctgatcgccgggcgcaccacgtcgttcatgaagcggtacacctcgtcccgcgaggggaagtgcacggcctgcgacaggcgtcgcttccagccgccggagcgcttgccgttgccgctcatcagcggcgccagggagtggctccgcgcccgctggcgctgcgactccatgtagaaggccttgtgcaggccccacatcatcaatagcaggatcagcgagaagggcagggaggtcagcaccaccgccgacttcagcgcgtcgatgctgccggcgaacagcagcccgccggtgaccagcgcggtgaccgagccccagaacacccgcagccacttcggtccgtcgtcgtcggcgctgccgccgtgggcggagagggtggagaggaccacggtgccggagtccgccgaggtgacgaagaagacgaagctcaccagcaccgtgacggtgatcaccgcgcggctccaggggtagttctggagcatctggtagagggccatcgacggctgctcgatggccacccggccgagttcgctggcgccgccgagggcctgctccagggcgctgttgccgaagatcgacatccacgccaaggtgaagccgagcgggatgaacagcacgccgaagacgaattcgcggatcgtccggccgcgcgagatgcgcgcgatgaacaggccgacgaagggcgcccaggcgatccaccaggcccagtagaacaccgtccacgagcccagccagtcgctggggccgccgtaggcgtagaggtcgaagctcttgcccggcaggtggccgaggtagtcgccgacgttctgcaccagggtgttgagcaggtgctgggtcggaccggcgaacagcacgaacagcaacaggctgcaagccagcagcatgttgatgtcggagaggatgcggatgcccttgtcgaccccggagaccgccaccgagatcgccgcgcccatcatcagcacgatgagcgccatctgcaccgggtgggtatgcgggatggcgtacaggtagtccagcccggagttgagctggagcacgccgaagcccatgtcggcgccgaggccgaacaccgtggcgatgatgccgaagcagtccaccgtgtagccgatcggcccgttgatgcgcttgccgatcaacgggtagagcgccgaacgcagggccagcggcaggttgtggcggtaggcgaagtaggccagggccatcgccaccagggcgaacacgccccagccgtgcaggccccagtgcaggaacagcagttccatggcctgccgcgcggcttcctgggtaccggcctcgccttgcggcggctggaggaagtgggtcagcggttcggatacgcagaagaagaacagggtgatgctgatgccggcggcgaacagcatgccggcccaggacaggtagctgaattccggctcgtcgtggtcggcaccgagcttgatcttgccgtagccggaaagcgcggtgaccaccacgaagatcaggtacagcgtcatcgccagcaggtagtaccagccgacggtctgcgaggcccaggtctgcgcggccagcagccattcgccggcgcgctgggggaagccgatgaccactgcggcgaacagcaggatcaggatcgccgcaccgtagaacaccgggggattcatgcggatgggcgtgggggtggagggggtggcggagggcgattgtgcgtcagtcaaaacaggctggtctcctcgtccttaatttgatcaagcgttcaatataaacacgatcaagggcccgggagccaatccttcggacgtatggaagccttcggcgccgcgcttttcccgcacgttcgccgaaggattccttcagttcgccgccagtcccaagcgccgccttcccgcctcctcgtcgccgcctgcctgctcggtggccagttgcaggagcagggcctgtatctgctccagcgacggcgctccggcttggccgagcaggcgccgcagaccggccagcgatgggtctggcgttgccccgccaaaattcagatgctgcggcaggatttcttccttgtcgctgaccagcagggcgaagtggacgacgttttccagctcgcggatgttgcctggccagggatagctctcgaggatccgctgggtttccacgccgatggccggcaccggcaggtccaggcgctgggcatagacgccgacgaagtattccgccagcggcaggatgtctcccggacgttcgcgcaatggcggcaggctcaggcggccgtcgtgcaggtattgttgcaggccggccaggaacttgccggcgcgcaccgcctggtccaggtcgacgctggtggcggtgaccaggcgcacgtcatggggaatcggctgctgcgcgccgacccgcagcacctcgcgttcctccagcgtctgtagcagcctggcctgcagcgtcagcggcaggtcggcgatctcgtccaggtacagggtgccgccattggccgaaccgaaccagccggcgcggctgccgaccgggccgttatgggcgccgggagcgtagccgaacagctcggcttcggcatggttgcgactgagggcgctgcaactgaccgcaacgaacagaccggcgcgttcgctgtggcggtggatctgcctggcgagcagctccttgccggtgccggtctcgccttcgatcagcaccggctggccctgtggcgcgaggcgctcgagttcttcgcggacccggtgcgagcgtgggtcgaagaacaccagggccttggcgcggatgctcagcggactgcggtcggcgtcggggaaggtcagcggcgcggggcgtggtttctcgctcatgggtaactccttggcggcacggggcgcctccagcgcctgcgccgtgacgacggccggaacggctgcgggcgggggccgttgcggaaaaagaaacgccggtgcaagccatgcgacaccggcgtgaacaaggggcgctgcaacggcgcccagcgtgggagtcgggacgggctggggtcagaaggccgggaccaccgcgccggcatatttcttctcgatgaaggctttcacttccgggctggtcagcgcggcggaaagcttcttcagggcgtcgctgtccttgttgtccggacgcgccaccaggtagttcacatagggcgagtcgcggtcttccaggaccagcgcgtccttggccgggttgagcttggcctccagcgcgtagttggtgttgatcaggtccaggtcgacctggtccagcacgcgcggcaacagggccgattcgagttccttgaatttcaggttcttcgggttctcggcgatgtccttgggcgtggccagggcgttgttcggatccttcaacttgagcaggccggccttctgcaacagcagcagggcgcgcccgctgttgctgccttcgttggggatggcgacggtggcgccgtcgggcagctcggccagcgacttgtatttcctcgaataaccaccgaagggctcgacgtgtacgccgaccacggtgaccaggttggtgcccttgcctttgttgaagttctccaggtacggcagggtctggaagtagttggcgtccaggcgcttctcggcgacctgcacgttgggctgcacgtagtcggtgaacaccttgatctgcaggtcgacgccttccttcgccagggtcggcttgatcagctcgaggatttccgcgtgggggatcggcgtggcggcgacgaggagcttttccgctgcgttggcggaaacgctgatgacggaggccagggcagtcagcaggagcagttttttcattcttcgatccttgtagggcgatgtccgcccctgcgttcagggcgttgaaggaggggcgccaacacgcgaggggcggcttgaaggggagagtagcgactctttttattccataaaaatattatttgtttatttttatattctattaatgaatatgagagagctgaggcaatttgtctcgcgacaaccgaccacagcaggacggtctaggctaacgggtaagattttcgtaccgaattgctctgcatcaaggcgggcggtccgggaatctgcttgcgacccttcccgcattcctgccatccagggctgcggtcgctttccaatgacaagaacgatagctgaaggatgtgttccaaaaccttgcgtagcgttgcgcgtgaggaagcacggccgaatccgcacgtaagccggaagggccgagaacctgaagaggagttgccatgttcggattggaggctatcgaccttgcccgcatccagttcgcgttcaccgtgtccttccacatcatcttcccggcgatcaccatcgggttggccagctacctggccgtactggaaggcctctggctgaaaacgaacgaagaggtctaccgcgacctctatcatttctggtcgaagattttcgcggtcaacttcggcatgggcgtggtgtccgggctggtcatggcgtaccagttcggcaccaactggagccatttctccgacttcgccgggtccatcaccggtccgctgctgacctacgaggtgctcaccgcgttcttcctcgaggccggtttcctcggggtcatgctgttcggctggaaccgcgtgggaccgggcctgcatttcttcgccacggtgatggtggcgatcggcacgctgatctcgacgttctggatcctcgcttccaacagctggatgcagaccccgcagggtttcgagatcgtcgacggccgggtgatcccggtggactggctggcggtgatcttcaacccgtcgttcccctaccgcctgctgcacatgtcggtcgccgcgttcctcgccaccgccttcttcgtcggcgcctcggccgcctggcacctgctgcgcgggcgcgacaacccggcgatccgcaagatgctctcgatggccatgtggatggcgctgatcgtcgccccggtacaggcgctgatcggcgacgcccatggcctcaataccctggagcaccagccggcgaagatcgccgcgatggaaggccactgggacaacagcagcggcgagccgaccccgctgatcctgttcggctggccggacatgcagcgcgaggaaacccgcttcaaggtggagatcccggtgctcggcagcctgatcctcaagcacagcctgaccgagccgatcccggcgctgaaggacttcccgccggaagaccggccgaactccaccgtggtgttctggtcgttccggatcatggccggcctcggcatgctgatgatcctggtcggcgtctggagcctgtggctgcgctggcgcggccaggacaagctgttcaactcgaaggccttcctgcgcctgaccctgctgatgggaccgtccggcctgatcgcgatcctcgccggctggttcaccactgagatgggccgccagccctgggtggtctacggactgatgcgcaccgccgacgcctcctcggcgcagagcgtgacgcagatgagcctgaccctgctgaccttcgtggtggtgtacctctcgctgttcggcgtcggtatcggctacatgatgcgcctggtgcgcaagggcccggtcacccatgagggacgcgagaccaacccgggaggcgccgggcagaagcgcacgccggcacggccgttgtcggccgccggcgaaggtttcgacgaagagcacgacggccacgcgcaagcggccgaccgcgaccaggacaagaggaactgagacatgggtatcgatcttcccctcatctgggcggtcatcatcatcttcggcatcatgatgtacgtggtgatggacggcttcgacctgggcatcggcatgctctatccgttcttcaaggacagcggcgaccgcgatgtgatgatgaacaccgtggcgccggtctgggacggcaacgagacctggctggtgctgggcggcgcggcgttgttcggggccttcccgctggcctacgcggtggtcctgtcggcgctctacctgccgttgatcttcatgctcgtcgggctgatcttccgcggcgtcgccttcgagttccgcttcaaggccaagccggccaagcagcacatctgggacaaggcgttcatcggcggttcgctggtggcgaccttcttccaaggcgtggcgctgggcgccttcatcgaaggcatcccggtggagaaccgcagcttcgccggcggttcgctggactggatcgcgccgttcccgctgttctgcggcctggccctgatcgtcgcctacaccctgctcggctgcacctggctgatcatgaagaccgaaggccgcctgcaggagcgcatgcacgacctggcgcgcccgctggcgttggtgctgctggcgatcatcggggtggtcagcctgtggacgccgctggcccatgccgagatcgccgcacgctggttcagcctgccgaacctgttctggttcctgccggtgccgatcctggtcctggtgaccttctatgcgctgctgcgctcggtggccaacaacgaccacgtgaagccgttcgtgctcaccctggtgttgatcttcctcggctacagcggcctggggatcagcctgtggccgaacatcatcccgccggcggtgagcatctgggaggcctcggcgccgccgcagagccagggcttcatgctggtcggcgcgctgttcatcattcccttcatcctcggctacaccgcctggagctactacgtgttccgcggcaaggtgaagcacggcgatggctatcactgaggaggcgccgcatatggtccgtacgccgagtcatcccgaacgagatagcgcggccaagccagcgctctggcgacgcctggcctggctggcgggtatctggaccgccagcgtgctggccctgggcgtcgccgcctggctgatgcgcctgttcatgagcgcggcggggctgggcgtcccgcactgatcgacgatcccatccgggcgctccggcgcccttttccgagagccctccgctggagggcttctttttgtccgccgatccgccagtgctcggtgttgcgccgtagggcgtcaatcctcgcgttcccgccttgcaccatccaggccggttcggcggatagccgcgctgcggttatccgccctacgggagcggcggatgcgccctactgaagccttggtagggcgaataacgccgcaggcgttatccgccgattcgccattgcttggcgttgcgccgtggggcatcagtcctcgcggcccctgatccgtgccagttgctccagtcgccccaggtagtcgcgcggggtttcgccgagcaggcggcggaacatgctgctgaaggcccgcgtactgccgtagccgaggtcgcgggcgaccacctgcacgctgtcgccggccagcaggcgcggcagggcttcggtcaggcgcaattgctggcgccactcatggaagcccatctgcaattcctgggcgaacagccgcgccagggtgcgcgagctggcgccgacccgcaggccccagtcatcgagggtcagccccagttccggctgtttcagcaatgcctggcagatcgcctgcaagcggcggtcgcggggcatcggcaggtacagcggcatccgttcgaggttggcgatctcgctgaggatcagcccttgcaggcgctggcggaagtcgtccaggcgcggctggctctcgaggtggatggcgcgcaggatcatttcccgcagcagcggcgtcaccgccagtacgcaacagtcgcttagcggtgtcggcgtttcgggttgctcgatgaacagggtgcgcatgtgcacctcgccggacatgaatatctcgtgctccacccggggcggaatccataccgcgcgggtcggcgggatcacccaggcgccgtggtgggtggccaggcgcatcaggccgcgagcggcgtagaggaactgcgcctgcgggtggaaatgccgccccaggtgatggccgtcggggaagtcgagggagatggcggccagcaggccgtccgggcggtgctcgatcagcatgtccgtttcgatgacctcgctgtcctgtctgcgcttttcggtcaacctatcatgcccgggtcatgacgcccattcctcaccgaccattcaggccgcacgccatgaaccgacctcgaaccgttatccgcttcatcaacgccgcgcatgtcatcgaccacatgttcatgctgatcttccccgccgccgtgctcggcatggccggcagcttcgacctcgactacgccggtctgatcggcctgtcgctgggcggtttcatcgccttcggcgcctgttcgctgccggccggctggctgggcgatacctggagccggcggcggatgatgctgttgttcttcttcggtatcggcgccgccgcactgctcaccgggctggccggcagcgtaccgatgctggtgaccgggctgaccctgatcggggtattcgccgcgatctaccacccggtcggcaccgcgatgctggtggcacacgcggagaaccgcggccgcgagatcggcatcaacggcatgtggggtaacctcggggtcgccttcgccgcgctgcttaccggctttctcaccgcgcacttcggttggcgtgcggcgttcatcctgcccggcggggtggccatcctgctcggcatcggctttttcttctgcgtgcgcgaggagccatcgccgcacctgtcggccaaggccgcggcgcgtggcgaggacagcgagggcctgtcgatgcgccgggtgttcggcgtgctggcgctggtcaccgccaccggcggggtggtgttcaacgccagcaccgtgacctacccgaagctgttccaggagcgcctgagcgacttgctggcgtcgccgcagaccctcggcgtggtggtcagcctggcctatgccttcggcgcggtagcgcaactgatcatgggccgcctgatcgatcgcctgaacctgaagttgccgttcgtcttcctcaccttctgccaggtgccgctgctgctggccctggcctacggccacggcagcgcagtggtgctgttcggcgcgctgttcatgttcgcggtgttcggccaggtgacggtgaacgatgcgatggtcgcccacttcgtcgcgccgcagtggcaggcgcgggtcttcgccctgcgctatttcctgtcgttcggcgccagcgcggcggcgatcccgatgatcgcctacctggagccacggcaggggctgctggggttgtacctggtactggcgggcttcgccgcgctgaccttcgccgcggcgctggtgtttccgcgtccggcgcgcagcgccgcggtgggcacctgaggaagagggcgcccggacagcgcgagccggccgggcgccgatggctcaacgccgtatcagagcagttcgagcgccacggcggtggcttcgccgccgccgatgcacagcgaggcgacgccgcgcttgccgcctttctggcgcagggcgttgatcagggtgaggatgatccgcgagccggtggaaccgaccggatggccctgggcgcaggcgccgccatagacattgaccttggcatgatcgaggccgtgttcgcgcatggcgagcatggtgaccatggcgaaggcttcgttgatctcgaacaggtcgacgtcgtccttgctccagccggtcctggcgaacaggttggtcatcgcgccgatcggcgccagggtgaactcgctcgggtcctggctctgggtggcatggccgacgattcgcgccagcggcttcaggccacggcgctgggcttcctcggcggtcatcaggaccagcgcggaggcgccgtcggagatcgagctggcattggcggcggtgatggtaccgtccttgcggaacgccggcctgaggctcgggatcttctccaggttggcggtcagcggttgctcgtcgtccttcaccacgctctcgcccttgcggctggtgacggtgaccgggacgatttccgccgccagcgagccatcggcgatggcggcctgggcgcgcttgagcgattcgatggcataggcgtccatctcctcgcgggtcacgccgtacttgtcggcggtctcctgggcgaacgaacccatcaaacggccggtacgggcgtcctccaggccgtcgaggaacatgtggtccttgatctcgccgtggcccatgcgcaggccgctgcgggctttctccaggacatagggcgcgttggacatgctttccatgccaccggcgaccatcacctggttggtgccagccttgagcaggtcgtgggccagcatcaccgccttcatccccgagccgcacagcttgttgatggtggtgcagccggtggcggcgggcaggccggccgccagcgcggcctggcgggccgggccctgcttcaggccggcgggcaggacgcaacccatgatcacttcctgtacgtcctcggcggcgatgccggcgcgctgcaccgcttcgcggatcgcgacggcacccaggtcgaccgcggaaacgccggccaggctgccctggaagccgcccatgggagtacgggcgccggcgacgatgacgatatcggacatggaacgttacctcttgttctggatagggtctgaacgattcagcgggcggattctatcttgtgaccgggaggctccgaaaggtcacggggcaaatcactcttttgactgatgaacaaagcccgccgacggctctagagtcggcctcatcctgacaacgaacccgctcccaggtgtacgccccatgctgaagacccgtctcatcccggccgccgccggcgcttatcagtatccgttgctgatcaagagcctgatgctttccggccgtcgttacgaaaagagtcatgaaatcgtctaccgcgaccaggtgcgctacagctacgccaccttcaacgagcgcgtcgcgcgcctggccaacgtactcagcgaggccggggtgaaggccggcgacacggtggcggtgatggactgggacagccatcgctacctggaatgcatgttcgccatcccgatgatcggggcggtgctgcataccatcaacatccgcctctccccggaacagatcctctacaccatgaaccacgccgaggatcgcttcgtgctggtgaacagcgagttcgtcccgctctaccaggcggtggcggggcagctggccacggtggagcggaccatcctgctcaccgacggcgcggagaagagcgccgaactgcccggcctggtcggcgaatacgagtcgctgctggccgcggccagcccgcgctacgacttccccgatttcgacgagaactccatcgccaccaccttctacaccaccggcaccaccggcaatccgaaaggtgtgtatttcagccaccggcaactggtcctgcacaccctggcgatggcttcgaccatcggcagcctggacagcatccgcctgctcggtaccagcgacgtgtacatgccgatcaccccgatgttccatgtccacgcctggggcactccgtacgtggcgaccatgctcggggtcaagcaggtctatcccgggcgttacgatccggaactgctggtcgaactgtggaagcgcgagaaggtcaccttctcccactgcgtgccgaccatcctgcagatggtgatgaacgccagggctgcccagggcgtggacttcaagggctggaaggtgatcatcggcgggagcgcgctgaaccgctcgctctacgaggcggccaaggcgcgcggcatccagctgaccgccgcctacggcatgtcggagacctgtccgctgatttcctgcgcctacctcaacgacgaactgctggccggaagcgaggacgagcgcaccacctaccggatcaaggccggcgtgccggtgccgctggtggatgcggcgatcatggacgaacagggccgcttcctcccggccgacggtgagtcccagggcgagctggtgttgcgctcgccatggctgacccaggggtatttccgcgaacccgagcgcggcgaggagttgtggcgcggcggctggatgcacaccggcgacgtggcgaccctggacggcatgggcttcatcgagatccgcgaccgcatcaaggatgtgatcaagaccggcggcgagtggctgtcctccctggagctggaagacctgatcagccgccatccggcggtacgcgaagtggcggtggtcggggtgcccgatccgcaatggggcgagcgcccgttcgccctgctggtggtgcgcgagggccagcaactggacgcccgtggcctgaaggagcacctcaagcctttcgtcgagcagggcaacatcaacaagtgggcgatcccctcgcagatcgcggttgttaccgatattcccaagaccagcgtcggcaagctggacaagaagcgcatccgtatcgagatcgcccagtggcaggaagccggcagcgccttcctgtcgaccgtctgacggggctttcctacaccgccgaaacgcccggaggccaagcaaacgcttggtctccgcgttttcgcgaccggccggtcattctccatccgccgcaaaggcgcgagccagagtggttgcgccgcgcaaatcacactttcgagggatcaagcggcaggcagcgctagctatagtccacgcactcataacaaaaaacacacatggagtagcgtcgatgacaacccgtaatccgttctcgcgtcgggcccggttgccgttggccgtcagcctggcttcctcgctggcggctccggcctttggggtgaccttcaacatcggggaaatcgaaggttccttcgattcggcgttgtcggtcggggccagttggtcgaccgccaagccgaacaagaacctgatcggtgtgaacaacggcggcaagggactttcccagacctccgacgacagccacttgaacttcaagcgtggggaaacgttctcgaaggtcttcaagggcatccatgacctcgaactgaagtacggcgataccggtgtgttcctgcgcggcaagtactggtacgacttcgagctgaaggacgagcaccgcgagttcaaggacatcgacgacagcggccgcaagaccctggccaagtcctccggagccgaactgctcgacgccttcatctaccacaactatgccatcggcgacctgccgggcagcgtgcgtctgggcaagcaggtggtgaactggggcgagagcaccttcatccagaacggcatcagcgccatcaacccgatcgacgtcaccgccttccgccggcccggctcggagatcaaggaaggcctgatcccggtgaacatgttctacctgtcgcagaacctcaccgacaacctgtccgccgaaggcttctaccagatcgagtgggaccagacggtggtcgacaactgtggcaccttcttctcccagccggacgtggtggccgatggctgcgaccagaacctggcggtgctgaccaacaacaaggcgtccatcaacctgctcaacaacgtgctcgccggggctggcctgagcgttaccccgtcgccctgggacgagggcatcctggtccgccgcgggccggaccgcgacgctcgcgacagcggccagtacggcttcgccctgcgctacttcgccgacgaactgaacaccgagttcggcgcctactacatgaactaccacagccgcctgccgatcttcagcggccagggcgcctcggccagcaccatggcggcgatcaacgacctcgccacccgcctcgccgcgatcaacccggcactggccgcccaggctgcggcggcggccaccgccggcaactccagctacttcatcgagtacccggaagatatccgcatgttcggcctgagcttctccaccacgttgcccaacggcaccgcgtggagcggcgaagtcagctaccggcccaacgcgccggtgcagttgaacaccaccgacatcctcttcgccggcctcgacccggtgagcatcggcggcaaccgcccctacgacaacgcctcggtgctgaacggccaggccgggcaggacctgcacggctatcggcgcaaggagatcacccaactgcagaccaccctgacgcacttcttcgaccaggtgatgggcgccgagcggctgaccctggtgggcgagatcggctggacccacgtcggcggcctggaaagcacctccaaggcacgctacgggcgtgacccggtcttcggaccggggccgctgccggggaccatctccggcctggccagctgccaggcgctgaacgtcagcacgctgggcaccgccgaagcgaacaacgtcagccgctactgcgagaacgatggctataccacctcggacgcctggggttatcgcgcccgtgcgatctgggactacaacgacgtgttcatgggcgtgaacctcaagcccagcgtggcctggtcgcacgacgtcgatggctattcgcccggtcccggcgccaacttcgaggaaggccgcaaggcggtcagcctgggggtggacgcggagtaccagaacacctacaccgcgagcctctcctacaccaacttcttcgacggcaagtacaccaccgtggacgatcgcgacttcgtcgcgctcagcttcggcatgaacttctgatgtacgccggcccggtgcgaaccgggccggcgagcaggacttaacgaggacgacgagcgaatgaaaacaacgaagattcttctgcataccggtgtactggccctgagcctgctggccacccaggtgatggcggcggtatccgccgacgaagcggccaagctcggcaccagcctgactccgttgggggcggagaaggccggcaacgccgacggcagcatccccgcctgggacggcggcctggcgaccaacgccggcagcgtcgacagccgtggcttcctcgccaacccctatgccagcgagcaaccgctgttcaccatcaccgcgcagaacgtcgaccagtacaaggacaagctgactcccggccaactggccatgttcaagcgctacccggatacctacaagatcccggtatacaagacccaccgcagcgccaccgtcccggcggcggtgcaggaggcggccaagcgcaacgccaccaccaccaagctggtggaaggcggcaacggcctggagaacttcgataccgccaacccgttcccgatcccgcagaacggcctggaggtgatctggaaccacatcacccgctaccgcggcggcagcgtccggcgcctggtgacccaggccactccgcaggtcaacggctcctaccagctggtctacttccaggatgccttcaccttccgtaccaacctgaaggactacaacccgaacaagccgagcaacgtgctgttctacttcaagcagcgggtcaccgcgccctcgcgcctggccggtaacgtgctgctggtccacgagaccctcaaccaggtcaaggagccgcgcctggcgtggctctacaacgccggccagcgccgcgtgcggcgggctccgcaggtgtcctacgacggtcccggcaccgccgccgacggcctgcgcacctcggacaacttcgacatgtacaacggtgcgccggaccgctacgactggaagctggaaggcaagaaggaaatctacattccttacaacagctacaagctcgacgatccgaagatcaagtacagcgaaatcgtcaaggccggccacatcaaccaggacctgacccgctacgagctgcaccgcgtctggcatgtggtcgcgaccctgaagccgggcgagcggcacatctacgccaagcgtgacttctacatcgacgaggacacctggcaggccgccgagatcgaccattacgacggtcgcggcaccctgtggcgcgtggccgaggcgcatgccgagcagtactacgacaagcaggtgccctggtacgcggtggaaaccctctacgacctgctctccggccgctacctggcgcttggcatgaagaacgaggagaaacaggcctacgacttcaactacagcgcatcggaaagcgactacaccccggcggcgctgcgccaggaaggggtacgctgagaaacggcgttcctagccacgaagaaaccggccttgtgccggtttcttcgttttcgcgggcggcgtgccgctccggccgtcaattcattacaaagtgttttcccgcctcgcccgcggattccgtcgtcgccatcctcccggcgggcacctgtgtggccgggaaacgtttgccgcgcctggaccgcgccgggaaaccggtctttccttggttatcgagctgaagcgccggtgcgctatttcgtccgagccgatggatagtgcttcaaatagccatcacttgtggttagtctccggagcgttcacgccccatatataaaccaagaaaccgggtgatgactgacttctcgcgcaccttctcgggcactccatccgccgttctgccgacggccaaccgctttttccgccccccgctgccgtcggcccatgtggcgcgcccgcgtctttgccgtcgactgcgcgacggactggacggtcgcctgctgctgatcgccgcgcccgccggattcggcaagagttccctggccatcgagttctgcgaaagcctcgatccgcgctggcagagcctctggctgggactgagcagccgcgagagcgatcccggacgtttcctcgaacgcctgctcgatggcttgcgacagtaccacccgaccctgggcgaagaggccctcggcctgctgaagatgcgccagcgtcaccagccgttcgccttcgagacctggctcgacgacctgctcgacgaactcgccccctgcctggacccgcagcgtcccctgctactggtgctggacgattaccacctggcccagggcgcggtgctcgaccgttgcctgcaattcctcctcaatcacctgcccgagggcctggtgctgctggtcaccagccggcagcggccggactggcacctggcgcgcctgcgcctgtcgcggcaattgctcgaactcagcgaacaggacctgcgcctgaccgccgaggagagcggggcgctgatggccgccagcggcctcgaactcgacgaggacgcgctggacgcgctgctcgagcgcagcgaaggctgggtcgccgggctgcgcctctggctgctggcgcgcggcgatccagaggagcaggtcagccccggggtacacggcgccgacgaactgatccgcgactacctgctggaggaggtgatcgagcggcagccgcccgaggtccaggcgttcctcgcccagaccgcgcgcttcgagcgcttctgcgccgagctctgcgataccgtgcgcgaggccggcgacagcgcggcgatcctcgaccacctgcagcagcaccaggtcttcctcgtgccgctggacgaaaacggccagtggttccgctaccaccacctgttctccgacctgctgctggcgcgtcccttgcccgacttcggtccgtccgccggctccctgcacctgcgcgcctgcggctggttcagccgccatggcctgctcgaccaggcggtggagcaggcgctgcgcgccggccagccggacgtggcggcgagcctggtgcagaacctgtcggaagagcaactgctggcggagcagaacatcgccaccctgctgcgctggaagatggacctgccggacagcctcctggcgagcacgccgcgcctgatcctgctgtacggctgggcgctggcgctggcctgccagctggatgccgcggaagaactggccggccaactggcgcgtttcctgccggcgccggacgagtccgcgcagcgcgacctgctggcccagtggcaggccctgagcggggtgatcgcgcgcggccgcggcgatatcgacaaggccgaggcgcactgccgcgaggccttgcaggacctcgccggggagcgctatggcacccgcctgcaatgcctgtcgacgctgagcaacctggcggtgacccgtggcgacttctggcaggcgcgcaactacaaccgcgacgccctggagttcgcccagcgctacggcaacccgctgttcgaggcactggtccattacgaccgcgcccgcgtcctccaggcgcgcggcgaggtggcgcgcgccgaggaggaggtgcgccagggcctggaacgcctccagcacctgccggcgcaacgccgctacgcggtgcgcgggcggctcctgctgtaccgcggctacctgcgcagcctggcgctgcagccggacgaagcgcgcaagtggatcaagcagggaatcgaggaaacccgcagctgccgggatgtcagcctggtgatcggctattgcgtcctggccagcctggaagggcgcctgggcaactacgcggcggcgttcgcccggcttggcgacgtcgagcggttgatgcatgcctgggatatcccgccgatctactacctggcggcgatcaccctgatcaagtgcgaactctggctggcccagggccagaccgaactggccggcgtctggctacagcgcctgggcggcacctacggcgggcaggcggccacgccgccggaatgcagtccgctgctgccgctgcatgtggagttgctccaggccggcctggagcgccgcgaaggacgcccggaggaagccgcccggcgcctggaccggctggcccgctcgacgcgggagaacggcgcgttgctgccggctcgcctggccctcggccaactggccgcgctgcacctggagcagggccgcgagcgcgaggcgctggcgaccctgcaacaggccatggagggcgcagtcggcggagccttgctgccgctccacgaattgctcgtgcagcagccggaatggttgcgcgaacagttgcagcgcttccctgcctgtcccggcgcccagcgcatgcgcgcgctgttgccggagccgcccgccgagcccgcgggcggtgcgggcgaggtgctcagcgggcgcgaactggcggtgctggagctgatcgctcaggggttgtccaaccaggagatcagcgagcggctgttcatctcgctgcatacggtgaagagccacgcccgccatatcaacgacaagctcggcgtcgagcgtcgcacccaggcggtggcgcgggccaagcacatggggttgttgcgctaggcgcgccaccccatgtgcctggcgtgctggctcagggcttccagcgtcgcaggagcagggcgttgccgaccacgctgacgctggagaaggccatcgccgcgcccgccaccatcgggttgagcaggccgaaggccgccagcgggatgccgatcacgttgtagatgaaggcccagaacaggttctggcggatcttcgcgtaggtccgccgcgagatgtccagcgccgccggcaccaggcgcgggtcgccgcgcatcagggtgatgccggcggcgtgcatggccacgtcggtgccgccacccatggcgatgccgacgtcggcggcggccagcgccggggcgtcgttgatgccgtcgccgaccatcgccaccacccggccccggcctttcagctcggcgaccgtggcggccttgtccgccggcagcacttccgcgtgtacgtcgtcgatgcccagggccttggccaccaccgccgcgctgccgcggttgtcgccggtgatcaggtggctgtggatatcccgtccgcgcagggcctccaccgcttcggcggcgccgtccttgaggctgtcgccgaaggcgaacaggccgagcacgcgtttctccggagccagttccagcagccaggacagggtgcggccctcggcctcccagtccgcggcggcactcgccagcgcgccgggcttgagttcctgctcgtcgagcaggcggcggttgcccagggccagccggcgaccctcgacctcgccctggatgccgcgaccgctgagggcctggctggcgttcaccggcggaacctccaggtcgcgctcggcgcagcgctcgagcacggccttggccagcgggtgctcgctgccgcgttgcagggcgccggcgagcctgagcagttgctcctggtcgtcgccgccgaggtggatgatctgcggtcgcccggaggtcagggtgccggtcttgtcgaaggccacgctggtgaccgcatgggcgacttccagggactctgcgtccttgatcaggatgccgtggcgcgcggccacgccggtgccggccatgatcgcggtcggggtggccaggccgagggcgcaggggcaggcgatcaccagcaccgccacggcgttaaccagggcctgctccaggccgaccccggcgaccagccaggcgccgagggtgaccagcgcgatgaggatcaccaccgggacgaagacctggctgaccttgtccaccagcttctggatcggcgccttggcggcctgggcgtcttccaccaggcggatgatcttcgccagcaccgtttccccgccgagcgcagtggtgcgcaggagcaggcggccttcgccgttgatcgcgccgccggtgaccttgtcgccgggagccttgggcaccggcaggctctcgccggtgatcagcgcctcgtcggcgtggctgctgccgtcgagcacctcgccgtccaccgggaagcgttcgccgggacgcaccaccacctcgtcgccgaggcgcaactcggcgatcgccacctcttcctcgcgaccgtcgcgcaggcgcaccgcgcgctccgggcgcaacgcctcgagggcgcggatggcgctggcggtctggcgcttggcgcggctttccaggtacttgccgaggaggatcagggcgatcaccacggtggaggcttcgaagtagaggtgcggcatgtggccaggcggggcggtcagccagaggtagacgctgaggccgtagccggcgctggtgccgagggcgaccagcaggtccatgttgccggcaccggccttcaccgcgcgccaggcggagacatagaagcgcgcgccgatgacgaactgcaccggggtcgccaggaggaactgcgcccacggcggcagcatccagtgcaggccggcccattccaccagcatcggcagcaccagcggcaacgccagcaacagcgcggcgatcacccaccagcgttcgcggcgcaggcggcgctcggcatcgtcctggcgtggttgccccgcgtcgagcaggcgggccttgtagccggcctgttccaccgcctgtagcaaggcctggctgtccacggcgccgagcagctcgaggtgggcgcgctcgctggccaggttgacgctgacctcgcgtacgccgggcaccttcttcagcgcccgctcgacccggccgacgcaactggcgcaggtcatgccctcgatggacagttccaggctgcgcgccggaacctggtagccggcctgctcgaccgccgccaccagggccggcaggctgtccgccggggcctgtacgcgggcctgctcgctggccaggttgaccgaggcggccgcgaccccgggcactttcttcagggctcgttcgacacggccggcgcaggacgcgcaagtcatgccgctgaccggcagatcgagctcggttagcgtggcgctgttcatgagtcctccttggaatggacagaagtggcatcgcaggcgccctgggaggcgccggtgagatctgtcgccaggttcagccttgacatcgtgtcaaggtcaagccccggattcatacaggaaggcggcgcagggcgcagtggcggctttatgtcgcaggggcagggggaatggcgctggaaaaccgttgcggcacggaaaagcggagggttttcacaggggtgggaccgataacactagacctcgcgaagggctgcgccaaggtatttcgtcgcttgcggaaaaaaaacctgctgatgacgaaaagtactttttaccgtcatattttttgcggtatttgtggaaccgtagaccgccgaaccctgcagcacaggtggcggccccggccctcacctctgctgtcaggctctccccaccggaagagagaaggcggctcgccccccggcggagcgccgacccggcattccgtcgccaggcccttagcagaaggtgatcgcgtatggatgaccacggacgttcccgccccacccagcccaccctgtacgtcctcgataccaatgtcctgatccacgatccgaatgccctgttgaacttccaggaacaccgcgtcgcgatcccgatgacggtgctcgaagagctggacaagctgaagaccggaaagcacaccatcgccgccgagtgccgccaggccatccgcctgatcgaccaggtactcggcgaggccacgcccgagcaggtagagggaggggtaccgatccagcgtggcaagaacggccccagcggcagcctgtcgatcctcatgagcaagcgtgccgagcccatcacctggctgccggagcacctcaacgacaacaagatcatcaaccagttggtcgagctgaagagccgccacagcggcgtgcgcgtggtgctggtgaccaaggacatcaacatgcgcctgaaggcgcgcgcctgcggggtggacgcggaggactaccacaccgaccagttgatcgacgacgtggccctgctgtcgcgcggctaccattccctcgccggctctttctgggaccgcgtgagcaaggtcgagacccgccaggaccacggccgtacctggcatcgtgtgcagctcaccgacaacctgccggcggtgcacatcaacgagttcatcgtcgacgaacagggcttcgtcggctggatcaagggcatccagcaggacgagctgaccatcctcgacctgcaccaggagccgctcctgcaccaggaagcctggggcctgcggccacgcgacgtgtaccagtcgctggcgctgtacgcgctgctcgacccggacatccacctggtcaacctgtccggtgccgccggttccggcaagaccatcctggcgctcgccgcggccatcgagcagaccatggtcagcaagcgctaccggcgcatcatcgccacccgcagcgtgcagggcctggacgaggacatcggcttcctgcccggcaccgaggcggaaaagatggagccctggctcggcgccatcaccgacaacctcgaagcgctgcacatggacgacgaatgcacccatggcagcgtcgactacatcctcagcaaggtgccgttgcagttcaagtcgctgaactacatccgcgggcgcagcttccagcagagcctgatcctcatcgacgaatgccagaacctcacgccgcaccagatgaagaccatcatcacccgcgccggcagcggttcgaaggtgatctgcctgggcaacctggcgcagatcgacacgccctacctgtccgccaccagctccggcctgacctacctcaccgaacgcttcaaggacttcccccacggcgtgcacgtgaccctgcaaggggtgccgcgctcggtgctggcggagtacgccgaggcgcacatgtgaggtagccggcggcaatcgccggccgatatcccgcccggttgaaaaagccgggcgggatatacatcctgccaggcccggtccggggaccgggcccgcatcgttacccgatcgggatgaggcgccttgcgccggcctgccctacctctttatgtatacaatcatcccccttccgaacctcccccaggcatcgcgtcatgccctccagggcttacaatgactggccagtatcctcttccaggagcacccacgtgctgacccatctcgattcccagggccgcgccaacatggtcgacgtcacggaaaaggccgtgacctcccgtgaagccacggccgaggccgtggtgcgcatgcgcccggaaaccctgcaactgatccaggacggcggccatcccaagggcgacgtcttcgccgtggcgcggatcgccggcatccaggcggccaagcgcacccacgaactgatcccgctgtgccatccgttgttgctcaccagcgtcaagctcgaactgcaggccgaggcgccggacgccgtgcgcatccgcgcgcgttgccggctggccgggcagaccggcgtggagatggaggcgctcaccgccgccagcgtcgcggccctgaccatctacgacatgtgcaaggcggtggaccgcgggatggtcatcgagcaggtccagttgctggagaagctcggcggcaagagcggccactaccgcaaagaggaggaagggcaggcatgatccgcgtgcagtatttcgcccgttaccgcgaagccctcggcatcgacggcgagcagttgaactgggacgccgggctggcgaccctcggcgccttgcgccagctcctggtggagcgcggcggggcctgggagcgtaccctcggcgagcagaacctgatgtgtgcgcgcaatcaggaactgtgcggcctcgacgagccgttgcaggacggcgacgaagtcgccttcttccccaccgtcaccggaggttgaacccatggccatccgcgtccagcaggcagctttcgatccggggcaggagcttaacgccctgcatgcgcagaacgtcggcatcggcgcggtggtcggcttcgtcggctacgtgcgcgacttcaacgacggtcgcgaggtcggcgggatgttcctcgaacattatccgggcatgaccgagaaggccctcggcaagatcgccgccgaggccgggcagcgctggccgctgctgcgcctggagatcctccaccgcatcggccgcctggagccgggcgagccgatcgtcttcgtcggttgcgccagcgcccaccggcaggcggcgttcgacgcctgcaacttcgtcatggactacctgaagacccgcgcgccgttctggaagaaggaagacaccgccgaaggcccgcgctgggtcgaaggccgctgcagcgaccaggccgccgcgcagcgctgggaggagtgacgtctacctcctcgcgccgccggcttacctcttcggaggaatagccagccgggggcccgcggttcaggctgaggcatcgcccgttcctaggaccccttccatgagccacctggccacctccaccttccagccgctgaacatcgccatcctcaccgtcagcgacacccgtaccctggaaaccgatacttccggccagaccctcgccgacgcgctgctggccgccggtcatcgcctgcaccagcggagcctgaagaccgatgacatctaccagatccgcgcggtggtctcggcctggatcgccgaccccgaggtacaggtcggcctgatcaccggcggcaccggcttcaccgcgcgggacaacaccccgcaggcggtcgggccgctgttcgagcgcgatgtcgagggcttcggcgaactgttccgccaggtctcgcagcgcgagatcggcacttccaccatccagtcgcgggcgctggccgggctcagcaacggtaccctggtgtgctgcctgcccggctcgccgggcgcctgtcgcaccgcctggaacgagattctcctggcgcaactggacagccgcacccgcccgtgcaatttcgtcccgcacctgaagaccccgccagccgtggcgccggtggccggctgcgggtgccgctcgtgagcgcttgcgcctgcgatggcggccaactgcgcccgctcgacgaggcgctggccgaactgctggcgcgcgcgccgcgcccgccagcctgcgagagcctggccctggagcgggcgctgggacgagtgctcggcgaggacctgctggcgccgatggacctgccgcattgggacaacagcgcgatggacggctacgccttgtgctccgccgacctgccgcgcagcggcggcagcctgacggtcggcgcgcggatcgccgccggcgacacccgcggcatgagcctgccgctgggccaggcggcgcggatcttcaccggcgcgccgctgccgaccggcgccgactgcgtggtgccgcaggaactctgcgtggtcgacggcgagcgcgtgcagttgccgccggtgagcgccggccagcatgtgcgccggcgcggcgaggagttgcgtcgtggcgcgccggtgctgcgtgccggacagcgcttgcgcccgcaggaactcggcctgctggcgagtctcggcgtcgccacggtctcggtgcgtcggcgcttgcgcatcggcctgctgagcagcggcgacgaattgcgcgagcccggccagacactgttggccgggcagatctacaacgccaaccgttactgcatcggcgccttgctgcgcggtctgggcttcgaggtgcacgacgaggaagtgctcgccgacgaactggtggccagccgcgatgcgctcagcctggcggcctccgaatgggacgcgctggtcaccagcggcggtgtctcggtaggcgaggaagaccacctcaagcgcgccatcgccgagcttggcgaggtcaacctgtggcgcctggcgatccagccgggcaagccgttcgccttcggctccgtggccggcaagccctggctggggctgcccggcaaccctgcggcggcgctggtcaccgcattgctggtggcgcgtccgttcctgcttcgccagcagggactgttcgacgtagtgccgcggccgctggcgctgccggcggccttcgactggccgcaaccgcgggcgcgtcgccagtacctgcgggcgcggctcgatgaacgggggcgggtggaaatccacccgcagcagggctcggcgatgctgcttgccgccagttgggcggacgggctggcggtgatcgagcgcggcgccaccctgggcgtgggtgatgcgatcgactttctgccgttctccgcactgatggcctgaggccttcttgatcccggtcaagcgccgaccgggagcgtctttctagagtgtggcgcctgtgccccggggttgcccactgccgcggagcgcgtttttcgccagaggagcaaccccatgcaactggtctgtccggcgggcagcctgcccgccttgaagtcggccctgcgacagggcgccgatgccatctacgtcggtttccgcgacgacaccaacgcccgccatttcgccggcctcaaccttgacgaacgccagttgcaggaaggcctgcggcgagtccacgaggccgggcggcagctctacgtagcggtcaacacctattccagcgcgcagggctgggagcgctggcagcgcgcggtggaccaggccgccgacctcggcgtcgatgcgttgatcgccgccgacgtggcggtgctcggctatgccgcgaagcgtcatccgcggctcaacctgcatctgtcggtgcagggctcggcaaccaatgccgcggccctggccctctatcacgaacgctacggcatccgtcgcgcggtcctgccccgcgtgctatcgctggcgcaggtacgccaggtggcggccggtagcccggtgccggtggaggtgttcgccttcggcagcctgtgcatcatggccgagggccgctgccacctgtcctcctacgtcaccggcgagtcgccgaacctctgcggcgtctgttcgccggccagggcggtgcgctggagcgaggaaccggaggggttgacctcgcgcctcaacgaagtgctcatcgaccgctacgccgccggcgaggcggccggctacccgaccctctgcaagggccgtttcctggtcaatggccagcgcttccatgcgctggaggaaccgaccagcctgaacaccctggacctggtcccgcaactggcggaaatcggcgtggcggcggtgaagatcgaaggccgccagcgcagcccggcctacgtcgagcaggtcacccgggtctggcgccaggcgctggacagctacgccagcgcgccgggcgcctatagcgtgcagccgcaatggcagcgcgcgctggccggactttccgaagggcaccagaccaccctgggcgcctatcaccgttcctggcagtgaggaccgccgcgatgaaactgagcctgggaccgctgctgttctactgggacaagcggcagatattcgatttctacgccgagatggccagccagccgctcgacgtcatctacctcggcgagaccgtctgcgccaagcgccgggcgctgtccctgaatgactggcaggcgctggcccgcgagctggcgcaggcgacccgtgccgagctggtgctctccgggctggcgctgatcgaggccgcttcggagctgtccagcctgcgccggctatgcgagaacggcgtactccgggtcgaggccaacgacatggccgccgtctattacctcagccagcgcggcgtgccctttgtcggcggtccggcgctgaacctctacaacggtcatgccctggccgaactgtattcctggggcatgcgccgctggattccgccggtggaagtctccggcaagctgctgcgcggggtgctcgaccaggctgcgcagctgggcctggagcaattgcagaccgaggtcttcgcctacggtcacctgccgctggcctactcggcgcgctgcttcaccgcgcgggcggagaaccggcccaaggacgactgccagttctgctgccagcagtatcccgaaggtatcccgctgctcagccaggagggcgaggcgctgttcaccctcaacggcatccagaccatgtccggcaaggtcagcaacctgctggccgactaccgctcgctggaacatagcggcgccgacctgctacgcctgagtcctcgggcgcagggcatggccgaggtgatcgcggccttcgaccgggtacgcaagggtgccgctccgccgctcgccgtggaaggctgcaacggctactggcacggccggccggggatgctgcgggcagaggaggcagggctatgctgaaccgccaacgcctgctcctcggcgtcgccggacgcctgttgccgctggcggcgaaggttccgcgcgggctccagcacctggtcctgcaacgggtcgccaaccggctgttcgcccagccgctggaggagggcgccttcgacctgctggaaggtcgctggctgcgcctggaagtcagggacctcggcgtcggctggtgcgtcacccgggtgcccggcggcctgcgcctggtcgaacggccacgggccagcgtgaccatccgtggcgactggcgcgacttcctgctgctggccagccggcatgaggacccggataccctgttcttccgccgccgcctggtgatcgagggcgacaccgagctgggcctggcggtcaagaacctcctcgacagcctcgacccggagcacctgccgccctggttgtggaacgccgtggaacgggccgggcgggcagtgcaggaggagcgcggcgaggcgccccaggggccggtccagggcgcgcggggcggctgaggtcggtggaaaggggcgtatagcgacgccaatgtcgctgggcgcgcccctccgattgggtgtattccctgaagcctgaaactcactgaagctcttttcagcgaggcaacgcccggttcgttgccgcatgggcggcgcggagcgaatgggcgtttcccctgaccaaacggatagcctgtctgtccccgtaacgcccctgtcaacttgccccggtaaaccggaccttcgtgaagcctgcggagaactccggtatgagtgggatggacctcaagcgccgccgcgtcgtgcaaggcctgggcgctggactgctgttgccggcgctgggcgcgccggcggtgatcgcctcgcccagggcgcggccgaagctgaccgatggcgtgcaatccggcgatgtgcagggcgaccgcgcgctggtctggagccgcaccgaccgcccggcgcggatgatcgtcgaatgggacacccgtagcgtcttcagcgagccgcgtcggctggtctcgccggtcaccgacgagcgcctcgactacaccgcgcgcatcgacctgcgtggcctgccggccgaccagtcgatcttctaccgggtgcgcttcgaggatgcccgcgacggcagcctgagcaagccctggttcggccacctgcgcagtgcgccgagcgaggcgcgcaatatccgtttcgtctggagcggcgacacctgcgggcaaggtttcgggatcaatccggatatcggcggcatgcgtatctacgaagccatgcgccggcgccagccggatttcttcctgcacagcggcgacaccatctatgccgatgggccgatccccgaacgcatcgagaccgagagcgggcgcatctggcgcaaccgggtgaccgaggccaagagcaaggtcgccgagaccctcgacgagttccgcggcaactaccgctacaacctgctcgacgacaacctgcgccgcttcaacgccgaggtgccgcagatctggcaatgggacgaccacgagaccaccaacaactggtcctccagcaagcagctcgacgagcgctaccaggtgaaggacatcgacgtgctggcggcccgtgcacgccaggcgttcctcgaatacgcgccgctgcgcttccagcgccaggggcgcgacgggcggatctaccgcaaggtcgcctacggccctttgctcgacgtgttcgtcctcgacatgcgcagctaccgcggcggcaacagcgccaacctgcaggcgcggcgcagcgccgccaccgatttcctcggccgtgagcagttgcaatggctcaagcgcgagttgcgcggttcgcgtgcgcagtggaaggtgatcgccgccgacatgccgatcggcctctgcgtgctcgatggcaaggacgcccagggtcgcgaccgctgggaggccatcgccaacggcaacgacggcgccgccctcggccgcgagctggagatcgccgatctgctgcgcttcgtccagcgcgccggggtgcgcaacaccgtctggctgaccgccgacgtgcattactgcgctgcccaccactacagcccggagcgcgccgcgttcaaggacttcgcgccgttctgggagttcgtcgccgggcctctcaatgccggtagtttcggacccaacgcgctggatggcacgttcggcccgcaggtgatgttccagaaggccccgctggtccagaacagttcccccttcgccggctaccagttcttcggcgaggtggagatcgatgcgcaaagccgcgcgctcaccgtcaccctgcgcgacctcgacggcgagccggtgttttcccaggaactgcagcccgacggcgcctgagccgcggcgaccccattccgataaaggagtatcccgatgcaccccttgcgtaacgccgccctgctgggcggcctggccctgctgggcctgccggtggccaacgccgccgagctgatcatctccgagtatgtcgaaggcagcggcaacaacaaggcgctggagttctacaacagcggcagccaggtcctcgacctctccgcctaccgcgtcgagttctatttcaacggcgccagcgcggcgggccgcagcatcgacctgagcggcagcctggcgccgggcaagaccttcgtcctcgccaacggcgtggccgacccggcgttgctggcgctggccagccagcgggtggaaggcagctggttcaatggcaacgatgcggtgctgctgcgccggcgcagcggcgagatcctcgacagcctcggccaggtcggcttcaaccccggcacgacctggggcagcggcgatgtgcagaccctcgaccggagcctggtgcgcaaggccgacatccgcgacggcgacagcgatcccagcgacgccttcgacccggcggcgcaatggctgggctacccgcgcgacaccttcgccaacctcggccagcatggcgctggcgagcccggcggcggcgaggaggccggcctgcgaccgatccacgaggtgcagggcgccggcgccgaaagtccgctggtgaaccagcgggtcgccatcgagggcgtggtggtcggcgacttccagaacgccagcgagctgaagggcttctacgtgcagcaggaagatgccacggtggacggcgacccggcgacctccgaaggcatcttcgtctacgacggcggcaacggcagcgacgtcaagctcggcgaccgcgtccgggtgacaggccaggtccgcgagttcaacggcctcaccgaactggtcgggccgctgcaggtcagcgtcctggcgagcggcgtggccttgccgacgccggccggcatcagcctgccgctggccagcgccgatgcgctggagcgctacgaaggcatgcgcgtgcagctccgccagacgctgaccgtcaacgaggtctacaacctcggccgctacggcgaggtcctgctgtcctccggcggccgccagatgactccgaccaacgtggtggctcccggcgaacaggccaaggccatgcaggcgcgcaacgacctcgaccggattctcctcgacgacggccgcagcgggcagaaccccgacccgatccgctacccggcaccggaactgagcgcctacaacagcctgcgcgtcggcgaccgtaccagcgccatcgacggcgtgctcgactactcggccggcagctaccgtatccagccgttgcagacgccgaccttcgaggcggccaatccgcgtccggcccagccggcggtggaagggcgcctgcgggtggccagcttcaacgtgctcaactacttcaacggcgatggcaagggcggcggtttccccacctcgcgcggagccaacacggccgaggagttccaacggcagaaagcgaagatcgtcgcggcgatcctcgcctcgaaggcggacatcgtcggcctgatggagatcgagaacgacggctacggcgagttcagcgccatcgccgacctggtcaacggcctcaacgccagcctgccccagggccagcgctatgccttcgtcaacccgaaccgggcgaagctgggcagcgacgaaattgccgtggggctgatctatcgcggcgacaaggtccgcacctatcgatccgcggcggtgctcgacagttcggtgaacccggagttcgacgacacccgcaaccgtccgaccctggcccagaccttccaggagatcaatggcggcgaacgcctgaccatcgcggtgaaccacctgaagtcgaagggctcggcctgcgacggcgacccggacaccggcgacggccagggcaactgcaacctgacccgggcgcgcgccgcccaggccctggtggactggctggcgggcgatccgacgggcgccaaggagcctgatcgcctgatcatcggcgacctcaattcctatgccaaggaagacccggtgaacgtcatccgcagcgccggctacaccgacctggtggcgcgtcaggcgggcgcaggaaagggctattcctacgtgttctccgggcagtccggctaccttgaccacgccctcgccaacgccagcctggcgcgccaggtacgcggcgcggtggagtggcacatcaacgccgacgagccccgggtgctggactacaacgtcgagttcaagacccctcggcagcaggacagcctgtacaacgccgagccgtaccgggcctccgaccacgacccggtggtgatcggtatcgacctgcgccgggtggcgatgaagaagcaccgcaggtaggcagcggatagcgcccgtggcgttggtcgccatgcagaaaggccacccgagggtggcctttctgcatggcacgtgggcctgtagggcgaataaccgcttgcggttatccgccgttgtggcgggatctcggcggataacgccggtggcgtattcgccccacggaacggaggtcactccagggtggccttgctgcgtggcacgtgggcctggtagggcgaataaccgcctgcggttatccgccgttgcggcgggaggtcggggataacgccggtggcgtattcgccccacagaacggaggccccaccaggttcgtacgtcgtcagccgcgcagcggcggcaggtagcccagttccatcagcttgatgtccgcttcgccgacgcgctcgaaatgttcgcgacgagtttcgtccatcggttcgcggccgttcagcagcagggtgccacggccgggaatgtcgaccagctccgtagccgccgggaagtccgtggcccttagcggatgcgggcagaagccgatccagccgatgctgcggcggtccgggaaggtccgctggtgtacgaagtacgcatgcggagcgagcatgccccaggtcgtttcgggccagatttccagcgccgcgaggaagatcgcgacgaaggaggaagccggtgcgtcgaacacttgcagcaggctgccggcatcttccaactggagcctggacgagacggccctgccgctggcctcgtagtccagcgacaacccgcccttgagcggatcctcctcgccgttccatagcaccagttccaccgcccgggtgcgtcggtcacgcgacagggccttggcgagatcctggcggtgctcggtgacgttgtggctgagggcatcgcgcagggagtcgccgcacaggtaccagttctccagcaccggatggaggggcgcgagggcatcgaggaagcgctctatccgttgcaggtgctggtcgtcgtccagtgcgaggagccgtgccggatcgaagtacagctcgaatatgtagcgcctgaaagccttggcgtccgtcatgcgcaataccccgggttctcttcgcaaaaccttttcatctcttcctgttccttcgcgcgggtttcctggtagtcgtcgtgctcgtccgttcccggcatcggattccagaatgccttcaggttggccagtcccatgcgcaggtactccgcggcgcagtactcgtagacgatccgctgcaggaagtgccattcgacgaacaccggcggggtcggtcgggccttgtcgctgtggacctcggccttctgcagcaggtccgacttcaccttggcccgcgcccagggcctgggcacgccgagcagcgggacgaacaggaaggcgtagttggccttcgcctccagcagggtgcagcgcggctcgtcgaagccgtcccaccaggtgccgctccagaaccattcgtggggaaacgggaaattggtcacccactgctggtagcgcgcggacaggtccgacatgctgtggcccttgccgttattggcgatggccatttcgccccgggacggcgggcactccacgcagtccttgtcgcggcccgggctcttgctgcaatcgcgctcggcttcccgggtccggtcgcggctcagcgtgccggtctcggtcctgggcagggtctgcggaaccggcatcggacgcggtaccggcctgggcagcgcgccgggggccggtcgcggcagcgggcgcggcgccggcatcggcaagtgcggccggggcggcgcgggtagttcgaagggcagccgcggacccatgcggggcagcggtcggaaaagcgcgcctatgccgctcatgccggtctccccgaggtttcgtacgcgcgccatttctggctggccaggcgaaactcgacgatccgttcgtagtcctggaagcgttgttccgggctgtccgccagcggccggcgcatgtgtgcgagaaacgccggcgtgtcctggaaagcggggaaggccaggccgtgcagaagaaagcgttcgatcgtcccgggctcttcgatacccagttccagcgccgtcgcgcgcagctcgccgagttgccggatggcgggcagcaggccgcgtcgttcgagccaggcgggagcctcccggcgtacctccagcaggacccgctcgatgacttcgtcgtcgcggacccgctgcaggcgatccagttggccggcatccagttcaagcatcggcggtccgctccgtttcccggtcatagacgaggtagccgccctgcaggggctgccagacctgccaacgctccagcggcgccatcacttgcgtccattgccgcgcggtcatgacctgttccagcgcccggcgcacttccgggctgtagtagcgcaacagcgcccggcggccgtcgggcatgcgggtgaagagcagcccggcgaagtgtttcgcgaggttttcgaaggacgcccggctccacagccaggaggccatgggcgagcggcggtcccagtcgcgcagccagccgaggaactcgcccgatgacgaaagcggggcgctgtccatgaattcgatcaggaccggcccggcatgggcgatttcgtccagctcgctcccggccagcagccagcgcgagcggatttcccccgcggccttttccaggcgggtgtccagggtcaggtagcgggcgccgtccgccagggcgaacaggcggctgtccggcgtaggcgccgcgagcgccggctggagccggctcacggtgcgccgccgaggctttccaggggcaccagggcctggttgcggcgtgccgccagcagcaggcattgcaggcacagcttcggtggggcgagggcgagagcgggtgcgccgccgccgctgttgccgatcagcaccgtgcccgccccgccgaccaccaggttgccgtgggtgccgacgctacctaccacggtggcgggcttgccgttgatcagtacgttggcgatgacgttggcgctgagggtggcgccgcaggcggtggcgtcgccctggcgggcagcggaccgatggtcgaagaagacgtcgggcgagccgccgacgatcgggttgctgccgtggcccggtagcggacacgcggtcggatcgcccaggcgcgcagcgggtttgccgctcatgctcaagtccctatgagataaaccctggcactctgccgtgccactcgggggcggacaacctatctgaactgctcaggaggcaccttcggaaacggcttgggcaaccgcgtccttgcctggttgcgcttgaagggatttcctacctggaagtctcgtcacccgcctgcgaaaggcgcaggcgtacggagcgatggcgcgatggggaggggagcctgggaggagggaaggaggcgtttcgcacagcgtcgcgttcgctttgcctgcgcagggactgtccgccgatatcgcgctggagcgacggatagccgcgatagggttatccgccctgcgccgagaccgccgggggaggagccagggaggctgtccctggctcctcccgtgcgatcagtgatgctcgcgcgtcgcgcggaagcggatgtccggccagcgttcttccatcaggctgaggttgacgcgggtcggcgccaggtaggtgaggtgcccgccgccgtccacggagaggttctcgaaggccttgtccttgaactccttgagcttcttctcgtcgtcgcactcgatccagcgtgccgaccagacgttgatcgcctcgtaggcgcactcgaccttgtattcctccttcaggcggctggcgaccacgtcgaactgcagcacgcccaccgcaccgaggatgatgtcgttgttgcgctcggggaagaacacctgggtcgcaccttcctcggccagttcctgcaggccctggcgcaactgcttggatttcagcgggtctttcaggcgcacgcggcggaacagttccggggcgaagtgcgggatgccggtgaaaccgaagttctcgccttcgctgaaggtgtcgccgatctggatggtgccgtggttgtgcaggccgatgatgtcgccggcataggcctcttccagttgctcgcgctcggaggagaagaaggtcagcgcgtcggcgatcttcacgtccttgcccaggcgcacgtggcgcatcttcatgcctttctcgtacttgcccgagcagatgcgcatgaaggcgatgcggtcgcggtgcttgggatccatgttcgcctggatcttgaacacgaagccggagaacttctcctcggtcggctccacgctgcgttcgtgggtggcgcgcgacagcggctgcggcgcccagtcgacgatgcagtcgaggacctggtcgacgccgaagttgcccagcgcggtgccgaagaacaccggggtcatctcgcccttgaggaaggcgtccttgtcgaattcgtggcaggcgccctgcaccagctccagctcctcgacgaaattgtcgtagagatcgccgaggtgggcgcgggcttcgtcggagtcgagcttttcgatgaccttggtctcgatgcgctcgtggccgtggcccgggacgtagacgatgatcctgtcgtcggccaggtggtagacgcccttgaagtccttgtagcagccgatcggccaggtgatcggcgcggccttgatcttcagcaccgcctcgatctcgtcgagcagctcgatggggtcgcggatgtcgcggtcgagcttgttgatgaagctgacgatgggcgtgtcgcgcagccggcagacttccatcagggcgatggtccgcggttcgacgcccttgccgccgtcgagcaccatcagcgccgagtccaccgcggtcagggtgcggtaggtgtcttcggagaagtcttcgtggccgggggtgtcgagcaggttgatcatgtgctcgcggtaggggaactgcatcaccgaggtggtgatggagatgccgcgctgcttttccatctccatccagtcggacgtggcgtggcggtcggacttgcgcgacttcacggtaccggcgacggcgatcgccttgcccatcagcaggagcttctcggtgatggtggtcttaccggcgtcggggtgggaaatgatcgcgaaggtacggcgcttcgcgacttcggcggcctgagtggtcatggatgcgtgcctgctggaatccgttggcgtgggcgcgggacggcccggaaaaacgcgggattatagcggtaaaacgcggcgcgtcgggatgcctgtcatccggcgatcgatggaattgccggtggacagcgaacttgtcgcagtcgtgccgttccaagcagccagcggcggccaccgccggatagactgctttcatttcacccgatcgaaggaagtcaccatgaacggagtatccagactgctctccctggcgttgctgggcgcggcgctgcactgggcgccggcgcaggccgaggagcagccgcggctgttcgaactgctcggccagcccggctacaaggccacctggcatgccatgttcaagggcgagagcgacgtgccgaaatgggtttccgacgccagcggcccgagttccccgtccaccagcctgagcctggagggccagccctacgtcctggccaacagttgcaaaccccacgattgcggcaacaaccgcctgctggtggcgttccgcggcgacaagagtgccgcctacgggctgcaggtgagcctgccggacgagcccgccgaagtcatgcagacgccgagcaagtacgccacctatcgctggtacggcgaaccctccaggcaggtccgcgagctgctgatgaaacagttggagagcgatccgaactggaagtgacgccgggcctgagggtaaccaggcccggcggcggggagggcggatgatcgctggcgatcgtccgccgttgcgccatgcgctcccgcggtctttcttcagaaaccgaccgaggcctgtacgtacagggtgcgcggctggccgacgtagaggcccttgttgttgtcgtcgaacgagcgggtgtagtagcggcgatcgaacaggttcttcacccccaggccgagcttgaggtcgttcagttgcgggccgaagtcgtaggtgccgcgcgcgctccagaccatccagccggcgatccgcccggtgctgccgtcggcgctttcgctctcggtgttggcgttgtcggcgtactggctggtctggaagctgccgtcgaggttgtagctccaggcgccggtgcggtagttggcgccaagggtgcccttgtgcttcgaggagaacggcacctggttgcccttgttcggcccgtcttcgcgaatgctcgcgtcgacgtaggcgtagctggcatagacgtcgaagccggagagcagcgggtcgagatcggccaggtcgtaggcgatcgccgcctcgatgcccttgtgccgggtcttgccgcgggcggtcacgctgtcggtctgctggttgctctcgtactggttgtcgaagttgatcaggaaggcgcccagttcggcgcgcaggatgccgtcgtcgtagcggctgccgagttcccaggtgcgggccttctccggctcgatgtcgccgctgcgcaccgccttgcccatctggctgtactgcacggtgccgaacgagccctcggtgttggcgtagaggttccagctcggcgtgaggtggtagatcacgttgagcgccggcagcgaggcattgtagcggccgctgtccttgctgttcttcagcaggttcttctgttcggaatcgatcttctcgtagcggatgccgggggtgatggtccaattgccgatgtcgatgcgatcgtcgatgtagaacgcgttggcttcggtgctgccgcgggtgtcgcggtcgttgcggctgccggtgctgggtagctggccgctgtcggcgcgggtccagtagcgcagctcgtggctggcttcgttgacgtagcggtggccgatgcccacttcgtggcgactttcgcccagctcgaagccctggctgaaacgggtttccaggccgcgtacccagtactcgcgcggcgacagggtgaggttgcggccctggtcgaggtagccgctgcgcagggtcttggtgaagaagccggtgacgttgagcttctggctggcgttgggggtgtattcgtagctggcgctggccagggtacggcggccccagaacttgtcgtagggacgggtcgactggtacgggtcgtcgcggtaggccgcggtgccgaggccgccgggcatgtcggcctcgccgtcgtagtactgggtcatcgccgaaaacgtgtgttcgtcgctgggctggaagcggcccttgaggatcaggtcgtcgatccgcgtatcgctgtgctcgcgccaatcgccgccgcgggtgccggagtagagcagggcgccgccgaggccgttggcgccggtgccgccgatcagcacgttgtgggtggtcttcaggccgtcctggctggagctggggctgagttcgctgtgcacgtcgagcttggtggcgaagtcctcggggatcgcccgggtcacgaagttgacgatgccgccgacgttctgcggcccgtagcgcaccgcgccgccgccgcggaccacgtccaccgcgtccatgttgccgatggacaccggcgccagcgacaactgtggctggccgtagggggcgaagggcaccgggataccgtccatcagcaccgtcgagcgcgacgccaggcgcgggttgaggccgcgaatgccgaagttcaatgccaggtcgtggctgccggtgccgttgttgagcggcgcgctgaccccgggaatgcgctccagcacttcgcgggtgctggccgcgccttgggcctggaactgctcgcggcggaccacgtcgcgcgcaccgggatgctcgaagacgtcggcggcgctggcgtcggccagccagtcgccgaccacggtgagcgcctgcaggttggccgggtcttccaccggcagcgcctccagggtataggcgccgtcgccgcgggcgcgcgcctccaggccggagccggcgagcagggcggccagggcttcctccagggtgtactcgccgtccagcgcctggctgcgccgcgcggcggtctgttccgggctgaaggcgatcagcacgccggcctggcggcctaggtggttcagcgcctgctccagcggctcggcgggcagccggtagtactggcgggcatcggtgcggatctcggcggcgcaggcgctgccggcggaaaccaggacgggaccgccgaggcaggcgaggagcagggcgcggctgagcggcgacagggcgcgtgacggggacatgagggacactccagtggatctttcgaggttggctttcctcctctgtcacgcgaggtggggaaaaaggctcaggtgcgcggaaatatctttccgctcattcgcgcgggtgcacgccgacccagtagcgggtgacgcgccgtacctccacgggcagcaccgccggcagggtggcgaggatccgctcgctatcgtccagcggatagctgccggaaatccgcaggccgccgatgcgcgggtcgcagcccagccggccggggcggtagcgcgcgacttcggcgaggaattcgtccaggcgcatgccggcggccaccagcatgccgtcggtccaggcgccgctgccgaccggcagcggctgcggagcgccgagtcgctcgcggtcgaagtccagctgccggccgctgggcagcagcaggccctggccggcgtggttctccacctgcaccgcgccttcgtggacggcgacgcgggtgcgtccggcgaactggcgcacgtcgaaccgggtgcccaccggtcgcagccggccttccgcgctgtacacgtgcagcgggcgcgggtcgtggccggtgctgagctggatttccccgcgcagcaggagcaggcgccgttcgccggcatcgaagcggacatccaccgccgtgtcgctgttcagctcgaggcgactgccgtcggccagggccaggcgccggcgttcgccgacgccggtggcatagtcggcgctccagcgctgcaggctgccgctctcgcgcaggccccaggcgctgccgccggcggccaggaccagcagcagggtcttcagcgcgcgccggcgttgcggcgaatgcggtgcgttgatggcggccagggccagtggcgtgcctatcccggccaggcgctggttgaccgcctcgatgtggcgccaggcctgctcgtgttccggggccgcctggcgccagcactccaaggcctggcgcaggcgttcgtcgtcggcgccgccctgcagctcgaccagccagcgcacggcctgttcagccacctgcggcggcaccttgggtgcggcgggcaggctcatggcagctcggcgaagtagcagcgttgcgcagccttgagcatgtagcgcttgacgctgctcagggagatgcccagctgcgtggcgatctcggcgtagcccaggccgtcgagctgggccagcaggaaggtctccttggccagcggcggcagaccgtcgagcagacggtccagctcgaccagggtctccaggacgatggcgcgggtctcttcgctggggacttcccgctcgggcaggctggccagggcttccaggtaggcgcgctcgacgtcctggcggcggtagtggttgcacagcacgcggcgggcgatggtggtgaggaaggcgcgcggttcgtcgatgcgcgcggcctggcgcgaaaccaggaccttgacgaaggtgtcctgggccaggtcggcggcgttctgcgggcagccgaggcggcgccgcagccaacccgtgagccagtggtggtggtcgctgtagagggtatgcaacgcggccgcgtgggcgaggtcggcgctcgacacctggacattcccggagcagaaggattaacgaatgataatagttatcattttatgctgcgggaatgcctgcctacaaccgcaggctgtcggcgcctggctttcaggaggctttcagggcggcgcggtactgccccggggtggcgccatgggcttcgcggaagcgccggttgaaatggctcggactggcgaagccgcaggccagcgagacctcctggagcgactgcgcggagtacgccagcaggtcgcgggcccgcgccaggcgtcgttccagcacgtagcggtgcggcggcaggccgaaggagacgcggaacatgcgcgcgaagtggtactcggagagcgccgccagctccgccagcgaccccagttccagcggctgctccaggtggctttcgatgtagtcggccaggcgccgccgcacgtgcgcggccagcccgccctgccagcgtacgtcggtacgcctgccgcacccggtgagcagcaggtggtccaccgcctggtgggcgaggctggtgcatagcaggcgctcgccgggttcgttccagtcctgtcgttccagggtccggcacagggcggccagcggctcgtcctggatgtaggtgcgctcctccagttgcaggctgcgtggttcgcaatcgagggtgcgtaccgccgcgccggccaggcgttccgggcttatgtacaggtgcatgaagcccaggccgcgtgttaccgcccagtcggagtggtgttcggccggcatcacgcaaaagcggtcggggccgccatagagcccgggacgatcgcggcggaaggtctgccagccgccctgcaggtagagcgacagggtgtgatggccggggtcgctgtagccgaggatctccgcttcgtcgcggtaccaatgggcgagcgccaggccgtcgctgagcgtgctgctgcgcagcaggcgcgcattggaggtccggtcgagggtgcggaatacctggaaatcactgggttggtgcatgccggccatgctacccgcgcccggacgctgccgcgagaggcggcggatgaaaagcgcaagaatggacaatggtcgcgcccggcctcgcccgcagactgacggcatcctgtcgttgcggagtcgccatgaatctttcgctgtacctgctcaccgtgctcatctggggcaccacctggatcgccatcaagctgcagatgggcccggtggcgatcaccctgtcgatcgcctaccgcttcgccctggcggcgctggtgctgttcgccgtgctgctgctcggccgccgcctgcaaaggctggacgcacggggccaacgcctgtgcatggcccagggcgtatgcctgttctgcctgaatttcatctgcttctataccgccagccagtggattcccagcggcctggtggccgtggtgttctccaccgccaccctgtggaatgcgctgaacgcccgcctgtggttcggccagcgcatcgcgtcgaacgtgatggccggtggcggtctcggcctgctcggcctggggctgctgttctggccggaattggtgggtcaccaggccaccccggaaaccttctacggcctcggcctggccctgctaggcacgctgtgcttctccaccggcaacatgctttccagcctgcaacagaaggccggcatccgcccgctcaccggcaatgcctggagcatgctctatggcaccctgatcctcctggcgctgtgcctgttccagggcgtgccgctgagtttcgactggagcgcgcgctacgtcggctcgctgctgtatctggcgatccccggctcggtgatcggcttcaccgcctacctgaccctggtcgggcgcatgggcccggatcgcgccgcctactgcaccgtgctgttcccggtggtggcgctgaacatctcggccttcgccgagggctaccgctggaccgcaccggcgctggccgggctggtcctggtgatgctcggcaacgtcttggtgttccgcaagccgaaggcgccggcgctggccgggccggcgcgctcgacctagcggagagggaggcgcgctcagccgcgtcgccacacctgtggattgaccaggtccagcggccgctcgccgcgcagggccgcctcgaagttctgcagcgcccgctcggccatggcccggcgggtctcgtgggtggccgagccgatgtgcggcagggtcaccacgttgtccagggcgaacagcggcgattcggccagcggttccttctcgtagacatccaggccggcgccgaggatgcgcttctcccgcagggcggcgaccagcgcggcctcatcgaccacctggccgcgggcgacgttgaccaggatcgccgagggtttcatcaggcccagttcgcgtgcaccgatcagctgccgggtctgcgctcccagcggcaccaccacgcagacgaagtcggcctcgccgagcagttcgtcgaagccgaggaagcgcgcgccgagttcctgttccagttccggcttgcggttgttgccgtggtagagcacctgcatgccgaagccgaaacggccgcgccgggcgatggccgcgccgatccggccgaggccgaggatgccgagtttcttgccatgcacgtcggtgccgaactgcggggcgtcgacggtgcgcttccagtttccggccttgacccaggcgtccagctcggcgacccgtcgcgcggcgctgatcagcagggcgaagccgaggtcggcggtggtctcggtgaggacgtcgggcgtgttggtgagagcgatgccgcggcggttcaggtagtccaggtcatagttgtcgtagccgaccgagacgctggagatgacttccagctgcttcgcctgttccagttgcctggcgccgagcggccggccgacgccgatcatgccgtgggtatcgggcagggcggcggcgtactgggcgtcgatgtcgccctgtttcggttcgagcacgcggacgttgaactggcattgcaggcgttcgagatgctcgggggcgaggcgactgaagacgaagacgttctttttcatgacgggactctgcaagcgggagcgaaagcgccgaccataccaccgccatcgaagcggcgggcaggggcccgccactgggcgggcgattatcggctcaggagggtcttccgagttccaggcccagctccaccagcgccgcttcgtcgcgctggagcaggccgggcaggctttccttgaggtattccacccaggtcttgatcttcgcgtcgagatactgccgcgaagggtacagcgcatagacgttgagctgttgcaggcggtgttgcggcaggacccgcaccagggtgcccttgcccaggtcctcgatggccgaatacaccggcaggataccgatgcccagcccggagcggattgcctcggtcatggcgtcgccgacattgacctggaacggcgaggcgccgatggagaccatttcctggccgttgggaccgtcgaacagccagcgatccagcggcaccaccgggctgaccaggcgcaggcagtcgtggctggccagctccgaaggctcgctcggcgtgccgttcaggcgcaggtactccggcgaggcgcaaagaatgctgtaggtctcgccgatgcgctgggaaatgaagccggaatcgggcagctcggaggccaccacgatggccacgtcgaagccctcgtcgagcaggtccggcacgcggttggccatggtcaggtcgaaggtcacgtcgcggtactgctggcggtagccggcgatggcgcggatcacgtagtgctggccgatgccggtcatcgaatgcagcttcagcttgccggcgggacgggcatgggcatcgctggcttcggcctcggcttcctcgacgtaggcgaggatctgctcgcagcgcagcaggtagcgctggccggcctcggtgagggcgatgcgacgagtggtacggttgagcaggcgggtgcgcaggtgcgtctcgaggttggccaccgcccgcgaaacataggcggtggtggtgttgagctgctgggacgccgcggtgaagcttccggtttccgccacgcagacgaaggctcgcatgttttgcagggtgtccatcgacggggcctcctaggcacgcgcagaagtgtgtcagattgttgcgagggcggattatttcacattacgcaataaacaatcgcacttgagccagcttatcagcagccgccagcctcttaaaattcatcggcccccgagcgcacgaacgctcgagcgggttgaacggcgcccgtaccgttcaaattccgtgcttcgcccctccaggatcagacaacgtgccgcgtgctctcaggaaggaactgaccttggtcggctccttcgtcggttttctcgtcgttttctccgcaatatccggttgtgtcagtacaggcgatatcgcccccgaggccgccacgctcgacgccaacgccctggccaccgaccatgcgatccaggctgccgcccgcgaggccggctggccgcaggcgcagtggtggaaggtgtatgccgatccgcagctggacgcctggatcgagaaggcgctggacggcaatccaggcctggcggtagcccatgcgcgggtacgccaggcgaagtccatggccgggctggtggagtccatcgagtcgccgcagatcgagggcaagggctcgctggtccgccaccgctggccggacgactatttctacggccccggcgacctggcgcggaccacttcctggaacaactccaccgagatcggcctgaactacaagctcgatctctgggggcgcgaccgcagcgacagcgagcgcgccgtcgacctggcccacatggccgccgccgaggcgcgccaggcgcagctcgagctggagggcaacatcgtccgcgcctacgtccagctctcgttgcagtacgccgagatggacatcgccaaggccatgctgcaacagcagcgcgacatcctcgccctggcccagcgtcgcctgcgcggcggcatcggcacgcatttcgaggtcagccaggcggaagtgccgctgcccgagaccgagcgccgcatcgaggtgatcgacgaagaaatccagctcacccgcaacctgctcgccgccctggccggcaagggcccgggcgagggccgcacgatccgccggccaagcctgaacctggcggcgcagccgagcctgcccagcgccttgccggccgaactgctcggtcgccgcccggatgtggtcgcccgccgctggcaggtcgccgccctggccaagggcgtggacgtggcgcgcgccgacttctaccccaacgtcgacctgatggcctcggtcggcttcagtgccgtcggcggcggcatgctggagttcttccgcagcgccaagtacacctacagcgccggcccggcggtgaccctgccgatcttcgacggcggccgcctgcgttcgcagttgggcgaggcggcggccggctacgacgcggcggtggagcaatacaaccagaccctggtggatgcgctgaagaacatttccgaccagttgatccgcctgcattcggtggacatccagaaggacttcgccgcgcaatcggtggcttccgcgcagaagacctacgatatcgccaccctggcctaccagcgcggcctcaccgattacctcaacgtgctcaacgcgcagacccggctgttccagcagcaactggtccaggagcaggtgcaggccgcccggctggccgcccatgccagcctgctcaccgccctcggcggcggcgtcggggccggcgccgatacgccggtgcagcggaagctggcgccggagaacgtcccggtcagagcggtgtcttcgcgatgagcggccgctccgctggtttcgccctgcccagccgcgacgagtggcggcgcgcgctggccgagtgggcgcgcagcgacggggcgacctggatctacgtgttcaaggtgctctgcgcggccttcctgaccctctggctggcgatgcgcctggaattgccgcagccgagcacggcgaccatcaccgtgttcatcgtcatgcagccgcagagcggccaggtgttcgccaagagcttctaccgcattctcggcaccctggtcggcctcagcgtgatggtcaccctgatcgccctgttcgcccaggagcgagtgctgttcctgctcagctcggcgatctggatcggcctctgcaccgccggggccgcccgctaccgtgacttccgctcctacgcctgcgtgctcgccggctacaccgcgacgctgatcggcatccccgccaccagccatccggaaggcgccttcatgcaggcgatctggcgggtcctggaaatcagcctggcgatcctctgctcgggggtggtcagcgcggtgatcatgccgcagaccaccagcgcggcgatgcgcaatgcgctgtacgtgcgcttcggcctgttcgccgcgttcgtcctcgacagcctgcgcggggtcggcgggcgcgagcgcttcgaaagcagcaacgtggccttcgccgcccaggcggtgggcctggagacgatgcgcgcggcgagcgccttcgaggatccgcacatgcgcctgcgcaatggccggctgattcgcctgagcagcgagttcatggccatgaatacccgtttccacgccctccaccagttgctcgaacgcttgcgcgcgcagggctccacccaggtgctggatgcgttcgagccgtgcctggaggaaatcaccgggctgctcgaggagatccgtggccgcgccgtcaccgaccatgacgccgagcgcttcgcccagcgcctcgccgactgccgcgaacgcctgatggcgcgtatccgccaggcgcgcggcgagctgctggcgcgggagccgggcgaagaggcgcggctggacttcaataccgccgccgagctgctctaccgtttcgccgaggaaatgcacgactacgccctgacccatgcctcgctggccgcccaccgccacgagcgcgagcagtggaaggacgccttcaccgccaaggccaacgcggtggcggcggcagtggcggggatgcgcaccgggttgatgatcctgctgttcggctgtttctggatctacagcacctggcccagcggcggcaccttcgccctcaacgcggtggcggtctcggcgctggcctcggcggcgccgaacccgaagaaggtcgccatgcagatggccatcggcaccatggcggcggcgctgctcggcttcagcgagatgttcttcgtctacccgcatatcgacggtttcccgctgctatgcctggtactggcgccggtgttcgccctcggcgcgttcatctcctcgcggccgcagtgggccggctacggtctcggcctgctggtgttcttctgcttcggttcggtgccggcgaacctgaccgtctacgacccggcccacgtgatcaacgagtacatcgccctgatcctctcgatgctgctctcggccgcggccgccgcggtcattctgccgcccaacagcgcctggctgtggaagcgcctcgagcgcgacctgcggatgcgcgtggtgttcgccatcagcggcaggagcagggggcttggctcggccttcgaaagcggtacccgcgacctgctgaaccaggcctatggcgtcgccgccgggcgcccggacgtgcagcgcgggctgctgcgctggatgttcctggtgctcgaggtcggccacgcgatcatcgagctgcgtcgcgagcaggagcgcctgccggacgaaccctgctacgccgaggccatgccctggcgccaggcgatccgcgccatggggcgggccctgatccggctgttcgtgcgccccggtgcggagaacctggagcgcgccctggcggctgtcgaccaggccatccacgcggccaggcacaccgacgaaccctgcgcgccgcacttcgacagctcgccgctacggcgggtgcgcagctacctgcacttcatccgttcttccctgctcgcgccgacctcgccactgaccgaactggccggccggacgagcggccaaggtaccgtccatgcctcgtgaaatcgccatccatggggtctacatgccgaccctgacgctgttgttcgtgatcgccgcggcgctcacctgggggctcgaccggatcttcgcctcggttggcctgtatcgcttcacctggcacccggcgctgttccgggtcagcctgttcgcctgcctgtacggcggcctgtccctgaccatctaccgctgaggcggtagcgcacctcttcgttatcgtgagccgaccatgaccttgaaatccgtaatcagcctgctggcgaccctgctgatcctgctggtcgccgtattcatcgggcggaccctgtgggtcaactacatggacaccccctggacccgtgacggtcgcgtgcgcgccgacgtgatcaatgtcgccgccgacgtttccgggatcgtcgtcgacgtcccggtgcgcgacaaccagttggtgaagaaaggcgacctgctgatgcagatcgaccccgaccactaccgtattgcggtgaagcaggccgagtcgctggttgcctcgcgcaaggcgaccctggagatgcgccagttgaacgcccggcggcgcgcggaaatggatgagatggtggtctcccgcgaaagccgcgacgacgctcacaacaccgccgccgcggcgatggccgactacgagcaggccaaggcccagctcgacgccgcgcgcctgaacctggagcgcacccgggtggtggcgcaggtcgacggctacgtcaccaacctcaacgtgcaccgtggcgactacgcgcgggtcggcgaggcgaagatggcggtgatcgacaagaactcctactgggtctacggctacttcgaggaaaccaagctgccgtacatccgcgaaggcgacccggtggacatgcagctgatgagcggcgaacacctcaagggccacgtggaaagcatcgcccgcggcatctacgaccgcgacaacccggaaagccgcgagctgaccgccgacgtcaaccccactttcaactgggtgcgcctggcccagcgcgtgccggtgcgggtacacatcgacgaagtgccggacggcgtgctgctctcggcggggatcacctgcacggtgatcgtcaagccgcaagggcgcgacgaccaggcctcggcggcgcaggcgccggggcgggccggttgagtggaaggggcagggagaagcccggcggatgccgggctttttcgtttcggcggggcggaagagggcgccactcgccaggaatacgctgcggttggcggctgccggcggtgaatatccacccggcggcctaggccccgacctgttcggccggcgacacgatcaggcccttgccgccgcgcgagcggccggagctgaggtagtcggcgatggattcctgggtgacctcgccgaggaactgctggtcggggtcgagcaccggcagccaggagctgttgaactcgtacatccgcgacaacaggatgcgcaggtgctcgtcgtggctggcggtgacccggaacggggtgacgaacggcgcgcaggtgccctcctggcggcgcaggtccttgcgtcgcacgtagcccaggcccttgccctggtcatccaccacgatcaggtagcgccggtcgttctcgtccatcagttccagcgcctcggccaccggggtctgcggccgggcggtgaccaggctgctgtcggcggcgtcttcggcgcgcaccaggagcaggcgcttgagcgtgctgtcctggccggtgaaggcgctgacgaactcgtccgccgggtgcgccagcagggtgtccgggtggtcgtactggagcagccggccgctcttgaacaccgccaccttgtcacccagcttgatggcttcgtcgatgtcgtggctgaccatgatcacggtcatgccgagcttgcgctgcatttcgaagaactcgttctggatcgactcgcggttgatcggatcgaccgcgccgaacggctcgtccatcagcagcagcggcgcgtccgccgccagcgcgcggattaccccgacgcgctgctgctggccgccggagagttcgcgcgggtagcgttgcaggtactgcttgggctccagcttgaccatgctcatcagctcgcgggccttctccttgcagcgcgccttgtcccagccgagcaggcgcggcacgaccaagatgttttcctcgatggtcatgttcgggaacaggccgatctgctggatcacgtagccgatgtggcggcgcagggtgacttcgtcgaggtccgcggtgtcctggccgtcgatcagcacgcggccggaggtcggcgggatgatccggttgatcatcttcagggtggtggtcttgccgcagccggaggggccgaggaagacgcagatctcgcctttctccacggtcaggctgacggaatcgacggcgcggaactccttgccgttcttctgggtgaaggtcttgctgagcttgtccagttcgatcatgttcggctcctgtcagtgcgcgctggcgcgcagtcccttgggggtgaggatgcgttgcagccattgcagcagcaggtcggcggcgatggccaggaggctgaccagtaccgcgccgaccaccagcatcggcatgttgctctggctgatggaagtgaggatcagcacgcccaggccgccggcgccgatcaccgcggcgatggtcatcacgccgatgttcatcaccacggcggtgcgtacgccggcgaggatcaccggcaccgcgaggggaatgtcgaccatccgcaggcgttgccagaaggtcatgccgatgcccttgccggcctcgcggatgcccgcttcgacgccggtcagggcgaggtaggtgttgcgcaggatcggcagcagcgaatagaggaacaccgcggtgatcgccggcagcggcccgaggccctggccgaataccgagtagaccggcatcagcaggccgaacagggcgatcgaggggatggtcagcatcaccgtggcggctccctgcaacgggccggccagccacgtgaagcgggtcatcagcacgcccagcggcacgccgacgaggatcgccaggcctacggcgaccagtaccagcagcaggtgctggagggtgagctggccgacctgggaccagtcgagatgggaaagcacgctgaagaagtccattactggctacctccctggccggcctggccgtcgtcgagcaggtggtgttcgcggaggaagtcggcggcgaccttctgtggcgtctgctgctcgatatcgacccgtgcgttgagcgcctgcatggtggcgtcgtcgagccgctcgatgatcggatcgaacagcgtggcgaactccggatggcgctgcatgacctccttacgcaccaccggggcggcgttgtagaaggggaagtactgcttgtcgtccttcagcacgcgcagcttgaaatccttcaggcggccgtcggtggtgtagacgaggccgaggaacacctggcggttcttcagcgcggtgtagaccagcccggcgtccatctggcggatgtcgttgcgggtgaagtgcaggccgtacagctcgctcatggggccgaggccgtcggggcggccggcgaactccgggtccatggcgaacaggtgggtgctcccgggctcggcctcctgctgttcggcgagcacccgcgcgagatcgctgacgctctggatgcccaggtgctcggcctgttcctcgggcatggccagggcataggtgttgttgaagcgggtcggcttcagccagaccaggccctgggcttcgtcgagttgcttgacccggcggtaggaagccgcggcgtcgagcttctcgtcgatgtggttgtagacgatcagcgacgagccggtgtactcccagacgatatccagttggccgctttcctgggcggcgcgggccagggtgctgcccaggccggtggtgaccgtcacgtcgtagccgcgcttctgcaggaactgcgcggtgatggcggtgaggatgcgctgctcggtgaaggtcttgccgccgatgcgcagggtttccgcctgcgccaggccggcggcgaacaggccggcgcaggccaggcagagtgagcggatcagtcggttcatcaggcctccttggcggtcaggccgcgttccaggaacatgcggctgaacagcaccaccagggcgtccagcagcagggcgaggagcgccgtgcaggcggcgccgagcagcagttgctggtggttgttcaggtagatgccggggaagatcaggctgcccaggctgttggcgccgatcaggaacgccagcggcgcggagccgacgttcagtgccagggccacgcgcacgccgccgacgatgatcggcaccgcgttcggcagttccacccgcagcagcacctggttgggcgtcatgccgatgccggtggcggcttccttcagcgccggcgagacattgcgcaggccctcgtaggtgttgcgcacgatcggcagcagcgaggcgaggaacagggcgaggattgccgggccgttgccgatgccgatgatcgccagggcgatggccagcaccgccagcggcgggatggtgttgccgacgttgaacacctgcatcaggcgttcggcctgggcctgcatgccgggacggctgagcaggatgccggccggcacgccgaccagcagggcggccgccatcgaactgaagaccagcaccaggtgggcctgcaagtagaacagcaggtcctcgcggtagtggaggatggtcgcgggggtgatccagtggatcagcaaggccagtacggcggctgcggcgcagaggccgagcagggccttgccacaggttttcaccatggtcgggactcccttcggaatgagcgttggctacgctgtcgggcgcttcgtcgaagcgcggaaacaggccggaaatcaaaggcttcggatgggcaccgaattcccgaccctgaaagggttgaccgttcgtcgttcgcggaggttcaacgaaacggccatgcttgtgccatgaccgggcctgggcaagcggccgcagccgccgtctcgcctgggctggcggcgaacgaagaaattttcccggggaagcggtcgataatggtgctgccgcgtcggcggcgcgccatgcaccgtatcggtgcgctggacgtccagggcttttctgcggttatgatgcgggttccgaaattttctcgggcttttccagacattcgcaccccacggttcacggatcggccttttggggtaggtgttttaccttctgctaagggagtaccccgcgtcatgctcgatctcgtcgcggcattcattgccttgaccaccttgctcacctacgtgaactaccgcttcatccgcctgccgccgaccatcggcgtgatggccacggcgctggtgttctcgctgatcgtccaggggctgtcggaactgggctatccgatcctcgaggtggagatgcaggaaatcatccgccgcatcgacttctccgaagtgctgatgacctggttcctgcccgcgctgctgttcgccggcgcactgcacgtcgacctctccgacctgcgcagctacaagtggccgatcggcctgctggccaccgccggggtgctgatcgccaccttcgtcatcggtggcctggcctactacaccttcccgctgttcggctggcaggtggatttcatctactgcctgctgttcggcgcgctgatctcgccgaccgaccccattgccgtgctcggcatcctcaagtccgccggcgcgccgaaaccgctggcgaccaccatcgtcggcgagtcgctgttcaacgacggcaccgcggtggtggtgttcgccatcatcctcggcatcctccagctcggcgaggcgcccacggtcagcgccacggcgatcctcttcgtccaggaagccatcggcggcgtggtcttcggtgcggtgctcggctacggcgtgttcgtgatgatgcgcggcatcgaccagtaccaggtggaggtcatgctgaccctcgccctggtcatcggcggtgccgcgctggccgcgcgcctgcacgtatcggcgccgatcgcgatggtggtggccgggctgatcatcggcaaccacggacgccactacgcgatgtcggacgagacccggcgctacgtggacaagttctgggaactgatcgacgagatcctcaacgccctgctgttcgccctgatcggcctggagctgctgctgttgccgttctcctggctgcacgtggcggcggccttcgccctaggcggcgcggtgctggtctcgcgcctgctcacggtgggcccggcgatcctggtcctgcgccgtttccgtggcgccaaccggcaggtaccggcgggcaccatccgcatcctggtctggggtgggctgcgcggcggcgtctcggtggcgctggcgctgtccctgccgttggggccggagcgcgacctgatcctcagcctgacctacatcgtggtgctggtatcgatcctgctccaggggctttccatcggcccgctggtgcgtcgtatctacgccggccagccgctggagaaaagcgagggggcgcactgagcgcagccttcgcaaagcgagcgcccgccgtcatggcgggcgttttcgttggcggccatcaggcgctgtcctgtggcgcttcgttgcgatgggtgccgcgcaggttcatcgccgccaggcagacctgcagcaggatcagcgcataggcctgggcgtacaggccccaggcgatccacagcaggttgctggcgaggaacacccagaagccgaccttgcgtcttcgccgatgcgccgacgccaccagccaggcggccaccaccgtgaccagcatggcgggccattgcaggtagtccagccagtgcatgcgtgcatcctttttccgacctttgagggtcagaccagccctggcgcggcaaagtgcggtcggatcggatagccgtgcagcagcgacctgacccgctcctcgtcgagtgctccgttgaactcggcgcccagggcttcgcggtggatgccggtggcgcccagccagagcgtatcgatgcgcgcggcgagggcgccggggacgtcggtcaccagcgagtcgccgacgaacaggatgtgccgcgcgccgcgcgcttccagttgccgctgggcgatgcggaaggccgccgggtcgggcttgccgtaccagctgacctggccgccttcctcgctgaacagctcggcgagcatgcccgcgccgtataccgtgcggccgccggaaaccaccacgcggtccgggttggcgcagaggaacggtaggtcggtggcgccgcgcaggggcgcgaagcgctgttccagttcatcctggggaaagctgccgacgccgacgatcagcgccgcctgggcgatgtcctcgacgaagcgctcgcggatttccgccggccagctctgctgggccaggccgacgccggccaggtagataccgccacgccggtattcggcggtttgcagcagggcgtcgatggtcaactggccggacgtggtgatgccggcgaaccagtcgcgccggatgcccaggcgctcgagcccggcgctcatttccgccacgctgctggacgagttgctgaggaaccagaccgggcggccttcggcgtgccgccgggcgagccaggcaagggcgccggggaacgcctcggtgccgtccatcactacgccccagagatcgagaaggaagccgtcatagtcggcgcagagcgcctccagttgcgcatggtcgagcaggcgggtgctggtggcggcgctgaagcgcggggaggtcggggcatcgctcatgggagtctcgtcgcggctgtcgaagtgggccgccgcgtgcggcggcgagtcccaagggtgccaaacttgcgtgacgggaccaagcctttcggccctgcgcgtgtttacggccggtcgagcgcctgggccatccactcgcgcacatggcagacggcgaagcgcgacgggctgcattcgccgttggccatcgccaggcgcaggccgtcgacgtcggcgccgcgcacataggcgctggcgtcgcgcatgtcgtcctcgtcgccgaaaccgccgtgctgcatttcctccagcgcggcctgcttgtcccagccctgcacgacgatgcggtacatggcggcgaacagtccggtgcggttgttgccgtgcttgcagtgcatcagtaccgggccttcgcgctcggctgcctgcaactggcggaggacgctgagcacctcggcgtcgtcgacccggtcggcgtgggtcggcaggctgagcacccgcaccggagcctggcccagccaggcgcggtcgtcgtccttgatgaagctgaccaccgtcttcacctgcaggcgttgcagcagcgcgacgctctgtgcgttgggcagcgcgctgcgatagagggtggggctcatgcggtagaggttgatcgacgggtcgaccgcttgcgcccaggctggcgaacgcgtggcggcagtctcggcggcatgcagcgggccgccgagcaggaaggcgccgagcacggcggcgaggagcaggcggagccaggcgagcggtgaacggtgcatgtcggcctcgtgcggtgggtggccaacactaggctagggcgggtcaagccgagctgaagagaatgtgaagaattcgttgaggcagcctcacctgtcagcgcaggaagaatccatagaccctgccggagaagaacaccagcaacagcgccggatagcacaggtagtgcagcaccacgatgagcagtgccgccgggctgggatcgcctttcagcgaggcgaggccgaccagcagcaggtaaaggaccccgagcactccgccatacagggcgaccaggcgcaagcgctcgccccaggtcggccagcgccgctgcgcgcgggcgaaccaccaggccaggccgccggcgaccagcgcggcgatcagcaggctggccggcaggccgccgaagcggaccaccccgcgcagcagcacgttgagcaggatcgccgcggcgatcccggccagggcgtagtagcggatgggtacggcaaggcggtcgcccatggcggtatctcctggcggtttcagaggcgcgtgtcgagaccgaagcgcttcttcagcagccgctccagcaggccgcgcggtagccagcgggccagcgccggcagggcccggctgccattgccgatgcgcaccagcggcgggcgcggacggcgctgcacggcggcgagcaactggcgggcgaagtcttcggcggacgtgggattgtcctgggatgccgcggcgcgcgcctggatctgccggcgcaacggccaccagggcgagcgttcgtcgaccacgctgtccatctcgcggctggcgctggcgccgaagttcgaggcgatggcgcccggctgcacttccagcacctcgacgccgaacggtgccagctccaggcgcagggcatcgctcagcgcatgcaccgcggccttggaggcgcagtaggcgccggcgaagggcgtgaccagcacgccggagacgctgccgacgttcaccaccaggccggacttgcgcctcagtagcgggaacagcgcgcgggtcacgccgaccacggcgaacacgttggtctcgaactgccggcgcatggcttcgacgccgccgtccagcagcggacccatggcgccgtagccggcgttgttgaccagcacgtcgaggccggcggcttcgactcccagttcctcggccagacgggccagcgcggcggcgtcgttgacgtccagttgcaccgcctggaagccggcctcggccagggcacgcacgtcgtcctccttgcgcgcgctggcccagacccggtagccggcgcgctggaaggcgtcggcgagggcgcggccgatgccgctggagcagccggtgacgaaggcgacgggttggctcatgggcagcgttccttggctgggagttggaaggagggcggcctaccgtactggattcgccggccgcggaaaaccgctcgaaggctcggtcaggcgtccttgcgcgcgatccgcagcgccagcggcatgcgaaccctgcgtgtcgaggtcggctcgccccagagcgcggcgacccgttgcagggcctggcgcacgaaagcgttgccctgcgcctcgcggcacaggcggctggccgaccaggtggccatgtagtcgaacaaccgggccaggctccattgttgctcgatgacgaaggccggcgcggggagttcgcccagcggcagctcgacatcccggtaggcgttccacagcaggcggttctgttgcgcccagtacgggccgatcgggcgcaggtattcctcgtcgatggcggcatcgatctgcgcgtcgatgctgaaccagccgtagccccaggcggcgaacacgccgccgggacgcagcacgcgcagcagctcgcggttgaagcgcgaatggtcgaaccagtgccaggcctgggctacgcagaccaggtcgaaggcggcgtcgggatagtcggtggcttcggcgtcctgcacgctgtagcggatacccggatggacaacggcgtgttcgatctgctgcgtgctggtgtcgctggcgaggacttcgccgaagtactgcgccaggccgagcgcggcctggccggtaccggtggcgcagtcccaggcgcgccggcgctggccgcagagcccggcgagatggcggtagagcgcatcgggataacgcgggcgggcgctggcgtaggcagcggagccctggtcgaacagacggcgggtttccatcgggtcctccctcggtcagttgccgaaacgcccgtccaggcgttcggcgcggaattccagggtgctggcgcgatagcccggacgcagcggcggcagcggcaggcaatcgtgccagctgtcgccgccgagcagggcgttcggcgcccggtagcgcgggctgtcgaagctggtgtcggccaggttgacgctgtcgccggggcggtaggcggcgatcctccagcgtagctccagcaacggacggtcgctgccgttcttcagttcgaccgccagcggccggtccaccggacagcgttccggcgcatagctcaggcgcagttcctggcgttgcaggtggcggctttcgtcgttgtcctgccagatcacccaggccgccaccaggcccagcccggcgagagccgccagggagaccggcagggccttggccgggtatcggacgaggaggatgacccaggtgagaaccagcagcgcaccgatcagcattgaaatgtcctttcttcgaagccgaggggacatcctagcgcactgctgcgtatcgcaggcggtacgggcacgcttacgcggcggaggcgccgcgatatgcgcgagggaggccgaaaggcggggatgcgggtttcggcaggctggggatagccgccgcccccggcctggccgtcattcgcagcggcgcttgccgcccggcgtcagcagacgctccagctcgacgaacaggcgctcggcgtcctgcgcctcgcagtcctcgccgtagcgcttcttcaggccgtgttcgctgagggtcaggtgcagggtcgggactacctcgtggcgcgccaggcagcctttcacgcaatgcagcgggcaaccgtcgagggccaggatcggtcgcccggagcgggcccggcggaccagcagcgggacgtcgccgccgactccggcgatgcaggacatctccgccagccgggcgcgatccaggcgcagcgcgagatcgttggccagttgcgccacgttggagcagccggagcaggcgtagaccaggggaaggggatcgtcggggctgcgttcgaacatcatgacgggcgcctcgtggaaggaagccgccagtatcgacgcagcgccgcggtggatttcttgaccggaatcaagcccgcgcgcggctcacaccaggtcgttctccaccgcccacaccgcggcctcgacccgcgaacgcatgccgagcttgtgcagcacccgcttgacatggaccttcaccgtgccttcggtgatgtccagctttcgcgcgatcatcttgttgctgtagccgtgggcgatctggcggaggatctgccgttcgcgctcggtcagctcgtcgaggctcttcgagcggtcgtcgccccgcagggcctgggcgaggatctgggtcaactgcgggctgagggtcatctgtccggtggcggcctggcggatgtgctcgagcaggcgctccggctccatgtccttgagcaggtagccgtcggcgccggcgcgcaggacgttgaccacgtcgcccttgtcgtcggacacggtgaacaccacgatgcgcgcgtcgactccggcctcgcgcaacgcgcgcagggtgtccaggccgttcatgcccttcatgttcaggtccagcaggatcatgtccgggtccagctcggcggccaggcgcagggcttcctcgccgctgccggcctcgccgaccacgctgaggtcgtcttccagttcgagcaactgggcgacgcccttgcgcatcatcggatggtcgtccaccagcagcaggcgaaccggttcgtcggcggtggctggcatgtccgtcatggggtcggctccttggcggcggagggttgcagggcggtcggcacgaagctgaagagcactcgcgtgccgtggggcgcgcgcgcttcgaagcgcaactggctgccgagggtctggccgcgctcctgcatgatggtaagcccataatggccgctgcggttctgctgcggatcaaagccgacgccatcgtcctcgacggcgatgctcacctggccgtcggcctggctgctcaggcgcacccaggcccgttgcgcctgcgaatggcgaaccacgttggaaagcgcctcgcggacgatctgcaggacgtggatttcctcgttggggctcagcggcacgtgttgcaggcggttgtccagttcgatcgtcacctcgccgcgctcgccgaactcggccacggcgttccccagcgcggcttccagactcggctcgtcgaggctgaggcggaaggtggtgagcagttcgcgcagttgccggtaggcgccgttgaggccttcgcgcagttcgtcgagggtgtcctcgatcttctccgccggcgcctcgcgcttgagcagggtgcccaggcggctgacctggatcttcaggtaggacagcgactgtgccagcgagtcgtgcagttcgcgggcgatggtgccgcgctcggcgaacagggccaggcggctttcctgttcctgttgcagggacagggcgaaggtgcgggcgatgttgtcgcagaaggtctcgatcagttgctgctgccagttctccaggcggccgctgcggctttcgatgaacagttcgccgaaacggtggccggcgatggacaagggctgcatcagcaatggctgggccagggacgagggttggtcgcaggcgctggcctgctcgcggcagctaccgcagtcgccctgcaggcagaagtccgccgggcgctcggtggtggtcagcgaactgtaggcgcgctcgaccccgtccttgttcaggcagagggtcacgcggccggcgtcgagcactttctccaactggttcagcagcggttgcagggtgcggctgtcgtaggggttctcgcctagccggcgggcgctggcgtagagcagttcgaggcgctggtggctctgcgagagggcgcgggtcttgtcctccacgcgctcttccaggtcgccgtagatgctcttcagctcgccggccatctggttgaagcgctcgcccagttgcgccagttcgtcctcgccgctgtaggtgacccgcgcgtccagctcgccgcggcccaggcggcgggcggtgctggtgagttcgcgcagcgggccgatgacgtgatagctgaggtcgtagagggtgacgaacaccaccagcaggctgaggaacaggcacaggccctgcaccgtgctgagcagttgcgagcggcgctcggccttggcctggaggatgccgacgaaacggtcgatgtcgccgacgtaggcgtccagcacggcgcgtccgggcagcgcgcgcgggtccaggcgcgcgaggccctcgcgcagctcctggtgcaactggcggatcgggtcgtcggcgtcctggcgttgcagcaggcggcggatgtcgccgctgtcgaggcgttcgccgagggtcccgagcagcgcctggcggccttccaggctgggctccagggcgacccggtaggtgagcatgcgcaacgagccggcgtggttgatcaccgcggcgtcctggtgcgtgtagtcggcgaagagcagggcgctgaacatcccgatcagcgccagcgataccagcagggtgaggtagcagccgaagcggactaccagggagcggcgcaggatcggctttccggccctgtcactacctccaaagaatctgtcccgctggtcagcgtccggcgcggtcgccttgttcatgagaaaagccttttaaaacagttagttgcgcaataatttcagccgtacctctttcgaggtaggggcgcgcatctaggcacggaacggccggtatttcattgattcctatcaaatttgcataggaacaccttccctaggctctcgctgaacgctgtccgtgcagagagtttagccatggcttccctacgtcagaaacagtactccgtcctcggtatgagtaccttgtccttcgcggtgaatttcgccgtgtggacgatgttttcgatcatcggcatccgtatcaaggacgagcttggcctgagcgaatcccagttcggcctgatggtcgccctgccgatcctcaccggctccctggtgcgcctgccgctgggcctgatcaccgaccgcttcggcggccgcatcgtgttcttcatccacatgctgctggtggccatcccgatctacggcctggccttcgccagccagtactggcactacctggtgctcggcctgttcgtcggcctggccggcggctccttcgcggtcggcatcgcctacacctcggcctggttcgagaaggagcgccagggcaccgcgatgggcatcttcggtgctggcaatgccggcgcagcgatcaccaacctggtggcgccgatgatcgtggtcgccttcggctggcgcatggtgccgcaggtctactcggtggccatgctggtcaccgccgtgctgttctggctgttcacctggaccgatccggcgcacctcaagggtgccgccgaggccagccagcggccgaccctggccaagcaactggcgccgctcgccgagctgcgcgtctggcgcttcggcctgtactacttcttcgtcttcggcggcttcgtcgccctggccctgtggctgccgaagtactacatcgccgaatacggcctggacctgaagaccgcgtccttcatcaccatgctgttcaccctgccgtccggcctgatccgcgccctcggtggctggttcagcgaccactacggcgcgcgctcggtgaactggggcgtgttctgggtctgcctggtgtgcctgttcttcctctcctacccgcagaccaccatgaccatccacggcatccagggcgacctcagcctgggcatcggcctgaacgtctggctgttcaccttcctggtgttcgtcgtcggcattgcccagggcttcggcaaggccagcgtgtaccggatcatccacgactactacccgagcaacatgggcaccgtcggcggcatggtcggggtgatcggcggcctcggcggcttctgcctgccgatcctgttcggctacgccgccgaccacatcggcgtgcgctcctcctgcttcatgttgctgttcggcctgaccgtggtctgcatggtctggatgcactacgcgatcaagcagcaacgccgcatcgacggccaggccgcctcggccgacgtcgaccttcctcccacccttcccacccactcctgaggaatgccgtcatgggcatgatcgccaatacccaactgaaagccgcacggggaccgctgctgctcgactggcgccccgaggaccccgagttctgggcgcgcaacggcaagcgcatcgccagccgcaacctgtggatctcgatccccgcgctgctgctcgccttcgccgtgtggatgatctggagcacggtgactgtgcgcctgaacagcgccggcttcgccttcagcaacgaccagctgttcctgctcgcggcgctgccgtcgatctccggcgccaccctgcgggtgttctattcgttcatggtgccgatcttcggcggtcgtcgctggaccgccctgagcaccgcctcgatgctgatcccgtgcatctggctgggcttcgccgtgcaggacccgagcaccccgtactgggtgttcgccctgatcgcgctgctctgcggcttcggcggcggcaacttcgcctcgagcatgtccaatatcagcttcttctatccgaagagccagcagggcaccgccctcggcctgaatgccgggctcggcaacctcggcgtctcggtgatgcagttcgccgtgccgctggcggtggccggcggcctgttcggcgccttcggcggcgagccgcagcagctcggcgacggcggtcgcctgtggctgcagaacgccggctggatctgggtgccgttcatcgccgtggtatcggtcgcggcctggttcgggatgaacgacatcgccgacgccaaggcctcgttccgcgaccaggcggtgatcttcaagcgcaagcacaactggctgatgtgctggctgtacgtggccaccttcggctcgttcatcggcttctcggccggcttcgcgatgctcagcaagacccagttccccgacgtcaacccgctgcaatacgccttcctcggtccgctggtgggcgccctcagccggcccctgggcggctggctggcggacaagttcggcggcgcgcggatcaccctgtggaactacgcgctgatgatcggcggggtgttcgcggtgatcgccttcctgccgggcgacggcggccagggcaacttcttcggcttccttggcgccttcatcctgctgttcttcttcgccggcatcggcaacggctcaaccttccgcatgatcccggtgatcttccgcaacgagtgggcccggcgggtgcgcgacggccaggccgacgaagccggcgcggcgcgcaacgcgagcatggagtcggccgcggtgatcggcttctccgccgccatcggcgccttcggcgggttcttcatcccgaaggcgttcggcacctcgctgcacatgaccggcagcgccgagggcgccctctacgtgttcatcgcctactacctgagctgcatcgtcgccacctggtggtggtacgcgcgcaagggtgcggagagtccctgttgagtccgtcggcagcagcccgcggcaacccctgattagcgttgtaacgcccggcacagaccgggtgaggagatcaagatgagtcacctgctcgaccgcctgcagttcttcaagaagaagcagggcgaattcgccgatggccacggcgagaccagcaacgagagccgcgcctgggaaggtgcctaccggcagcgctggcagcacgacaagatcgtgcgctccacccacggggtgaactgcaccggctcctgctcctggaagatctacgtgaagaacggcctgatcacctgggaaacccagcagaccgactacccgcgcacccgtccggacctgcccaaccacgagccgcgcggctgcccgcgcggggccagctattcctggtacatctacagcgccaaccgcctgaagtacccgaaggtgcgcaagccgttgctcaagctctggcgcgaggcgcgggcgcagcacggcgacccggtgaacgcctgggccagcatcgtcgaggacgccgccaaggcgaagagctacaagagccagcgcggcctgggcggcttcgtccgttccagctgggacgaggtcaccgagatcatcgccgcggccaacgtctacaccgccaagacctacggtccggaccgggtgatcggcttctcgccgatcccggccatgtcgatggtcagctacgccgccggcgcccgctacctgtcgctgatcggcggggtctgcctgagcttctacgactggtactgcgacctgccgccggccagcccgcagatctggggcgagcagaccgacgtgccggagtcggccgactggtacaactccagctacatcatcgcctggggctccaacgtgccgcagacgcggaccccggacgcgcacttcttcaccgaggtgcgctacaagggcaccaagaccgtctccatcaccccggactattccgaggtggccaagctcaccgacctctggctcaaccccaagcagggcaccgacgccgcgctgggcatggccttcggtcacgtgatcctgaaggagttccacctcgaccggccgagcgcctacttcgtcgactactgccgccagtacaccgacatgccgatgctggtgttgctggaagaacacgccggcggcgcgttcaagccgacccgctacctgcgcgccgccgacctggcggacaacctcggccaggacaacaaccccgagtggaagaccatcgcctacgacgagcgcagcggcgggctggtctcgcccaccggcgcgatcggctaccgctggggcgagtctggcaagtggaacatcgccgagctggacggcaggagcggtgaccagacgcgcctgcaactgtcgctgctcgatggcccggaacatgcctgcgaggtggccttcccgtacttcgccgggcaggagcacccgcacttcaagggcgtcgccaacgacgaggtactgctgcgccgggtgccgttccgcgagatcgtcgcggcggacggcaagcgcctgcgggtggccaccgtctatgacctgcagatggccaactacagcatcgaccgcggcctgggcggcgacaacgtggcgacctcctacgaggacgccgacacgccctataccccggcctggcaggagcgcatcaccggcgtcccggcggcgcgcgcgacgcaggtcgcccgcgagttcgccgacagcgccgacaagacccgcggcaaggcgatggtgatcatcggcgcggcgatgaaccactggtaccacatggacatgaactaccgcgcggtcatcaacatgctgatgatgtgcggctgcatcggccagagcggcggcggctgggcgcactatgtcggccaggagaagctgcgcccgcagaccggctgggcgccgctggccttcggcctggactggagccggccgccgcggcagatgaacggcaccagcttcttctacctgcacagctcgcaatggcgccacgagaagctgtcgatgcacgaggtgctgtcgccgctggccgacgccagccgcttcgccgaacacgccctggactacaacatccaggccgaacgcctcggctggctgccgtcggcgccgcaactgaaccgcaacccgctgcgcatcgccgccgaggccgaggccgccggcctgccggtcgccgactatgtggtgcgtgaactgaagagcggcggcctgcgcttcgccagcgaatcgccggacgatccgcagaacttcccgcgcaacatgttcatctggcgctccaacctgctgggctcctccggcaaggggcacgagtacatgctcaagtacctgctcggggcgaagaacggggtgatgaacgatgacctcggcaaggccggcggtccgcgtcccaccgaggtcgactgggtcgacgacggtgccgagggcaagctcgacctggtcaccaccctggacttccgcatgtcctccacctgcatgtactcggacatcgtcctgccgaccgctacctggtacgagaaggacgacctcaacacctccgacatgcaccccttcatccatccgctgtcggcggccaccgatccggcctgggaagccaagagcgactgggagatctacaaggccatcgccaagaagttctccgccgtcgccgaaggccacctcggcgtggagcaggacctggtcacggtgccgctgctgcatgacacccccaccgagctggcgcagccgttcggcggcgacggccatgactggaagaagggcgagtgcgagccggtgccgggacgcaacctgccgacgctgcaccaggtcgagcgcgactacccgaacgtctaccgcaagttcacctcgctcggtccgctgctggacaagctgggcaacggcggcaagggcatcggctggaacaccgagaaggaagtgaagctggtcggcgacctcaaccatcgcgtggtcgagagcggcgtcagccagggccggccgcgtatcgacagcgccatcgacgccgccgaggtggtcctcgccctggctccggaaaccaacggccaggtcgcggtcaaggcctgggaagcgctgtcgaagatcaccggccgcgagcacgcccacctggcgctgcccaaggaagacgagaagatccgcttccgcgacatccaggtgcagccgcgcaagatcatctccagcccgacctggtccggcctcgaggacgagcacgtcagctacaacgccggctacaccaacgtccacgagctgatcccgtggcgcaccatcaccggtcgccagcagttctaccaggaccacccgtggatgcaggcgttcggcgaaggcttcgtcagctaccggccgccggtcaacacccggaccaccgagaaactgttgaacaggaagcccaacggcaacccggagatcaccctgaactggatcaccccgcaccagaaatggggcatccactccacctacagcgacaacctgctgatgctcaccctgtcgcgcggcggtccgatcatctggctcagcgagcacgacgcggccaaggccgggatcgtcgataacgactgggtcgaggtgttcaacgccaacggcgcggcgacctgccgcgcggtggtcagccagcgggtcaaggacggcatggtgatgatgtaccacgcccaggaacgcatcgtgaacgtacccggcagcgagaccaccggcacccgtggcggccaccacaactcggtgacccgcgtggtgctcaagccgacccacatgatcggcggctacgcccagcaggcctggggcttcaactactacggcacggtcggctgcaaccgcgacgagttcgtcgtggtgcgcaagatgagcaaggtcgactggctggacgaaccccgccacggcggactcggcggcgacgccctgccgcaaccgctgccccaggacatttgaggagagacgccatgaaaattcgttcgcaagtcggcatggtgctgaacctcgacaaatgcatcggttgccacacctgctcgatcacctgcaagaacgtctggaccagccgcgaaggcatggagtacgcctggttcaacaacgtcgagaccaagcccgggatcggctacccgaaggaatgggaaaaccaggagaagtggaagggcggctgggtgcgcgcggcagacggttcgatccgcccgcgcatcggcggcaagttccgcgtgctggcgaacatcttcgccaacccggacctgcccgagatcgacgactactacgaaccgttcgacttcgactaccagcacctgcataccgcgcccaaggccgagcaccagccggtggcgcgcccgcgctcgctggtctccgggcagcgcatggagaagatcgagtggggcccgaactgggaggagatcctcggcaccgagttcgccaagcggcgcaaggacaagaacttcgaccaggtccaggcggacatctacggtgagtacgagaacaccttcatgatgtacctgccgcgcctctgcgagcactgcctgaacccggcgtgcgtggcgtcctgcccgagcggggcgatctacaagcgcgaggaggacggcatcgtcctgatcgaccaggacaagtgccgcggctggcggatgtgcatctccggctgcccgtacaagaagatctacttcaactggaagagcggcaagtccgagaagtgcatcttctgctacccgcgcatcgaggccggccagcccaccgtctgctcggagacctgcgtcgggcgcatccgctacctcggcgtgctgctctacgacgccgaccgtatccacgaagtggccagttgcgagaacgagcgcgagctgtacgagaagcaactggagatcttcctcgatccgttcgacccggcggtgatcgcccaggcgcgcaaggatggggtggccgacagcgtcatcgaggcggcgcagaagtcgccggtgtacaagctggcgatggactggaagctggccctgccgctgcacccggaataccgcacgctgccgatggtctggtacgtgccgccgctgtcgccgatccagaacgccgccgccgaggggcacatcggcagcgacggggtgatcccggacgtcgagtcgctgcgcatccccgtgcagtacctggccaacctgctcaccgccggcgacaccgcgccggtgctgctggcgctcaagcgcctgctggcgatgcgcgcctacaagcgcgccgagcacgtcgaaggccgccaggacctggaggtgctggccaaggtcgggttgagcgtggagcaggtggaggagatgtaccgctacctggccatcgccaactacgaggatcgcttcgtgatccccagcgcgcaccgcgaggaagcgctttccgatgccttcgccgagcgttccggctgcggcttcagcttcggcaacggctgttccggcggcagcaactccgccgtcaacctgttcggcggcaagccgaccaaccgccgcgacgtgatccaggtcgtgcagatccaggagtgagcgccatgaacgatcacagccaactgttccgcctgctcgccctgctactcgactatccacgcgccgagctgcgcgaggagagcctcggcctgcatgcgctgatccgcacctgcgaactgccggaagcgctgcgcgacggcctcgcggcgctgctcaacgagctctgccagggcgacctgctggacgtccaggcgcgctacgacggtctcttcgagcgcggccgctcggtctcgctgctgctcttcgagcacgtccacggcgagagccgcgaccgtggccaggcgatggtcgacctgctcgaccgctataccggggccggcctgcagatcgacgtaccggagctgccggactacctgccgctgtacctcgaatacctgtcgctgctgccgttcgcggcggccagcgaagggctcgccgaagtggcgcacatcctcggcctgctggcgctgcgcctggaggaacgcggcagcgcctacgcggcgattttcgaggcgttgctggaactcggcggcgagcgcccggacctcggcgcgttgcgtcgcgaccaggcccaggaacagcgcgacgacagcctggaggccatcgaccgggcctgggaggaaaccccggtgagcttcaccgaccctgccggcggttgtccgtcgagcagcggccgccgtccgacggcgtccaccgaacaaccattgcaatgggtcgcccagccggtaccgcagatgcagtaccgcgcggcccgcgaaggagtctgagcatgtcgaccaatcttctgttcttcgggatctatccctatgtcgcgctgctgatctgcctggtcggcagctgggcgcgcttcgacctctcgcagtacacctggaaggccggttccagccagatgctcagcaagaagggcatgcgggtatacagcaacctgttccacgtcggcgtgctgttcatcctcgccggccacttcgtcggcctgctgaccccggcctcggtctaccaccacctgatcagcaccgagaacaagcaactgctggcgatggtctccggcggcttcttcggcgtgctctgcttcatcggcctgagcggactgatcctgcgccgcctgaccgacgcgcgggtgcgcgccaccggcaacgcctccgacctgatgatcctgctggtgctctacgcccagctgatcctcggcctctccaccatcgtcgcctcgacccatcacatggatggctcggtgatggtgatgctcgccgactgggcccaggccatcgtcaccctgcgtccgctggcggcggccgaggccatcgcgccggtgggcctggtctacaagctgcacgtcggcctgggccttaccctgttcgtgctgttccccttcacccgcctggtgcacatcgtcagcgcgccggtgtggtacctgggccggcgctaccagatcgtgcgtcagaaacgtcctgcctgaaccctgggcggccggcgcatccggcgccggcccgccgaaccgaggtgatcgatcatgagttgctcccactacgaagaacgcgtcgagaaggtcgaactgccgcaactgaaggtcaacggcgtggccatcggtgaagacctgctggctcgcgagctgcaataccacccggcggacagctacgcgctggcgctggaggccgcctgccgtgcgctgatcgtccgccagttgctcctgcaacgggccgacgcgctgggcatcgaggcccgctgcgaagacggcgagacgccggaggaagcgcgcatccgccaattgctggaggaagaggtgcaggtcccggaagccgacgaagacgcctgccggacctggtacgcggccaatccgggacgcctgctcggcccctggcgcctgcaattgcgccatgtgctgctggcctgcgcgccggacgacctggagggccgcgagacggcgcgcaagcaggctgcggagctgctcgacgaattgcgcgggcatcccgagcgcttcgtcgacctggcccggcgtttttccgcctgcccgtcgaaggagtcgggtggcgaccttggctggatcgagccggggcagaccgtccccgaattcgagaagcgcctgctgcgccgcgcgcccgggctgctcgagcatccgctggaaagccgctatggcctgcatgtggtggaactgctggcgcgcgaaggcggcgagccgctcgacttcgacgcggcccgcgcacagatcgccgcgcacctgcaggtgcaggtgttgcagcgggccgtggggcagtacatcggcgtgctggcgggagacgcctgtatcgaaggcttcgccttcgagggcgcggatggggcgctggtgcaatagccttcggtgccgatgtttccctctccctcccgcacatcaatcggagtacccaggacatgaccgactggatcgatggccaaggccgacagatcgactacctgcgcctgtcggtcaccgaccgttgcgacttccgctgtgtctactgcatggccgaggacatgcgcttcctgccgcgccagcaggtgctgaccctggaggagatcgagcgggtcgcccggctgttcgtcgccggcggtgtgcgcaagctgcgcctgaccggcggcgagccgctggtgcggcccggcatcgtcggcctgtgcgagcgcctggcggcactgccggggttgcgcgaactgtgcatgaccagcaacggctcgcaactggtgcgctacgcccggccgttgtacgacgccggcctgtcgcgtctcaacatcagcctcgataccctcgatccgctgcgcttccgggcgatcacccgcaacggcgagctggacaaggtgctggccggcatcgacgccgcccaggccgccggtttccgccggatcaagctgaacgcggtggtgatgaaggggcgcaacgccgatgaggtgccggcgctggtggacttcgccatcgcccgcggcctggatatcagcttcatcgaggagatgccgcttggccaggtcggccgcgaacgtggcgagagcttctgctccagcgacgaagtacgcgcgctgatcgcccagcgccacgccttgctcgacagcgccgagcagagcggcgggccggcgcgctacgtgcgcctggtcgagcatccgcagacacgtatcggcttcatctcgccgcactcgcacaacttctgcgccacctgcaaccgcctgcgcctgaccgtcgagggccgcctgctgctgtgcctcggccacgagcattcgctcgacctgcgcgcgctgctgcgccgccacccgctgcacgacgggccgttgctggaagcgatcggcgaggcgctccagcgcaagccggcgcgccatgaattcagcgccgccggcgaggtgcaggtgctgcgcttcatgaacatgagcggcggctgaggcgactcggggcgcctccagcgggccttcgccagcggccagggcgaggccgctcttctggtaggccagcagggtctcgctgctgtacagctcaccccaggaaaacatcacggcataaccgtcgctggagctgcgcgcgatcacatagctgtagcggcttgcagtcgaaaaccggcgggctcgcaatcagcgcgattttgggctcagattatctgcgactgacggtggaggcgggctcacattaattgcgagcgagcttgcaatccgtgcgccgggcttgcaatccgttaccgcgggctcaggctctttgcgactgacgctcataccggtaatccggcactttgcatcttttcctgcaactcgaaaatgtcggtgcggtaaccaatttcttccatcgtggggcggcgcagatcgttacacagcttgggatggccagccaggacaatggacaagcgtcgccggccgctgtcgtcttcggccagttcgagcagtcgcttcagaccggtcaaggtatggccattgagatcatgggtttcatcaacgagcagggccacggggcgcttgctcttctttaccagttcgtacagttcgcgatcccgtttttcgatctgggtgggaatgcgtacctgtttctgggtggaaaggtcatagaagagcgcggcgatgaaggtggccagcttgatgttgtgcttctcgatggccatcgatctggactccgtgactttcttttcctcttccagcaggtgctacaaacgacgcagcatcaccgtcttgccgctgccgatcacaccacacagggcgatcagccggccttcgaagatggcgccgcggatgtctctcatcaactgctgatgatgggtggtttcgaaatagcccgcctgattcgagggggctcagtccgtagccagggtctcgctcagcacctggtcgatgaaggcgcggtcatccattgaaagcttggccagcggcattgccagttcctcggcgatagccagcttggccgcaatgcgggattcctggtgctcgaaaacgaagggctggatggggagcgtcgagtcagcagagccgggctctagtcgtacatcttccccggaaagcgccgcgatcggcagccccaactggtccgcgagagatcggatacgagccgagcgctcgtctgccttgctgcgcttgaaagcccggtagcggtgctgcggaatggggccggacaccgggtagtgaggaccgaaccgctcgccatcgaactcggcatgcagctcatcgtcgaacagcccccagagcagcacgacgtagtcgccggccatctctggctcaagctcgtacgcggtaccgtcggtggtgattcgggcatcaggcccgactttgcgccgctcgggctcccgagcaaagcggcagaactgatcccatgagcacatttcacggatcccctctgttggcacatgggtgatccagtcctcgatccgtgaaaggggttcggcacgatgtgtctgctggttgtaggtgcgcactaggtagcgcaacagccactcgttggcctgggcttcggtttccggcttgtggaagtggtacagggtctcgtgggcttccttcactgtgcggaaaggacgttcgaccttgcctttcgagcgggccgtggtgcgcgttccatccttgctggcagggatgtgtgtctgccactcgatgcccagcgcccgcatgacgctctggaaaacgcgacgcttggccaccggaccgttgtccagatagatcagcttgggccggccctgaaagggaaaactcgggtccgctttcggcgccatcgagttgaacagaaaacgaagtgccgtctccgcatcctcaccataaacgcagtggtattcctggtaggccacaccgctgcggtcatccaccacgctgaacagcatcagggtgggttcgcccttggcgggatcgatccaccgcggatgctcaatatgcttgaggtccgacggcgacatgtcgaactgccaacaatcgttgctgtgctcagcctggaaccgagttgcgcctggctcccgggacagttgagcaggccttaatcgccaatgtgatagatatcggttgacggtgggtctgtggagtacgcctcttggggcaacaatgaggccccggtcagtttctacaccgtactcttccagcagctcaatggcgcggtgtgtagatagatgccgcccctgcttgttggtggtgcgcagcttcaacgccgcaatcagttcgcagtagcgctccagttccgcctggggcaggacgcggggcttgccctggtcggagcggtgggctgcctaggcctgtgcagaaggaccagggcgcgatagaccgtactggaggaaacgccgtacagttcagctacaagggccacctgacgggcccgctccgggctcttcttcggcaagtgatccaggcgctgcctccgttgcagcagcgaatcgacgggaatggccttacgcctgctggtgggcattccgttctgcctcggtgatgtagttgtagagcgtcgagcggccgattcccatcatccgacagatctccaccacggtgtattggcgctcgtgatagagcttcagggcgactttgcgcttggcgggatccaggcgtttcttgcggccacccagccgaccgcgagcacgtgctgcagatagtctcgcatgggtgcattcacggatcaggttgcgctcgaactcggctagcgcggcaaagaggtggaaaaccaaacgccctccggtggatgtggtgtcgatgttctcctggaggctcttcagacccacgccggcatcctccaattgctcgaccaggtagatcaggtccttgatcgagcggccaagccggtccagccgccagaccaccaccgtgtcgccccgccttagattggcgagaagcgcggccaggccgattcgatcggccttggcgccgctggcagtgtcttcgaacactcgctcgcaatccgccttggccatcgcatcgcgttgcaggtccagtagttgatcgtcggtggaaatgcgcacgtacccaatcagcatgatttcgttcagaaatgcgcgaaaggcagcataggtgaattttgaaagcgagaaatcgttactggactaaaagtacgcggtttctgggggcggccaaggggaacgaggctggcgtccagaaaacggtcgtctgatggacgcttccacgaacggagcgataccgcaaagggaagaatggagtgcaaccatcgtagagcttcaaactgagatattgcagttgattgccgcatctggccggcctattgccgtgcattttctacctactactgcatcgctcaagaaggttctgtaaatatattggttcaactctttcgataggaaagccattcatgacaaataatagtgcgccaccacttgtcgtgaccagaggaaatgataatggttacgagcctgggtcgatggttattacgcatgtacaggctagtgggctagacataatccagtacattccaggtcggtcaagctacggtactccaccatttgtcccgccaggaccaagcccgtatgttggccctggaatgcaagagtacaggaggctaagagatactcttgataagtcccattcagaactcaagaaaaacctgaagaataaaaccttgaaggaggtggatgaactcaagagtgaagcggggttgccagttaaagcggtcagtgccaatgacatccgcgatgaaaagagtatcgttgatgcactcatggatgccaaagcaaaatcgctaaaggccattgaggatcgcccggccaatctttatacggcttcagactttcctcagaagtcagaggcgatgtaccagaatcagttgctagccagtcgaaagttctatggagagttccttgatcgacatatgagtgagctggccaaagcgtacagcgctgatatctataaggcgcaaatcgctatcttgaaacaaacgtctcaagcactggagagtaaagcccggtcaatggaggcgcaagcccagcaggtcactcaacagctcggtgccgacttcaacgcgatcaccactccgaccgccaccaaggtccagcaacgtgtgaaagcagtggatgctagtctgtctcaggtttccacccaggtcagtggtgcagtcgcctcggcaacccaggcggtgcaggtcaagacagcgcaagctcagcaacaagccaacagccagatttcgtccagccagaacctgatcagcgcggcatttcggaatcagattgccttggcagcacaggccagtggagaagcccaggtcacggctttcaacaccaaagtcaagcagatcgtcaacgaagccacggcgttttcgacagcacgaaaacaagcgctggctcagtttgctgccaatgcggccgccgaggtcgaaaccgaggtcaacaggctaaccgcccaggtcaaggcaagccccaccaaggcggcttcgcaagctgcacaagcaacccttcgacaattcactgaaagcacctatgccaaggtgaacacctatgcccagcagaccgaagcagagctgcaggccaaagccaaggaggtttcggcagcggtagccgaggcacagcgtgcggcgaccaacgatttgcaaaaaacagccgatgtagtaccaggtcagatcatccaggctgcgaacaccttggcgatgccggctacctctacgccgctggtttcggtggccgggtttggtagtgcggcagtggagacggctcgcctggcggcttccctaacgaatgctgtcaatcgcctggttcagattgctggtagtggacctggcgcatacgtggccaccttcgcggtgctgtcgctgtattccgaccaggctggtaaagacagtgacaaggttcctgccggcgttcgcaatgcattggcactggaggcgtccgctctgggtcttcctggcacggctgatttgcaaagcgccgccaaggcaggtggcacggttgatatgccggtacgactcacgagtgctgcacaagagagcccgagtggtaaatcgcagattgccgcggtgctgaccaacggggcaactgtccccaagggcgtgcctgttcgcgccgcgaccctcaatgctgcgacgggccggtatgaggtgtcggttcccgcaaagcccaccgtaccgaatacaccaccgctgatcttgacctggacccctgccacccctccaggaagccagaacccctcaagcaccactccggtcgtaccgcagccggttccggtgtatgagggagcaacgatcaccccagtacaggccgagccggagtcctatccgggagtgccgttagatctggacgatctgatcgtgatcttcccggtgggctcggggggtaagccaatctatataatgttcaatcataaccctcatgatgttgttattgatgataagatcagagagcaaattccaattagagggtggactgaggttgaaattagagatgttatcggaaaaggtgcaacaggtagttcttcagataagcgtcggcctaataagacgatagatgggctggggcggaatgactctgcaacagtatatggaagtcctcctaatggatatatagttgtgaacgataggacaggtgaaattattcaaattgcagatcggaacgattccgcatgggcggttgacgggcgaatcatctggagaaataagtgatgatcaatcctaactctatcgaaatagttgacaatggcctagattttttttcaaaagaaggcaatgggaagatgtggctaactacgaaggcaactctggaagtcgtatctttggcaactaaaaaagggttggcaatttcaaaaattgagggattcatctggcataaggatgtagggaggttcgaggcaagacttgatgccatatttgaagggcttgtcaatccagtaaaagtgcctgatgatgtcaataataataacactagagcgaaagagagtacagaggaagatgcttctcttgggcatgatgcttttgttgtaacaattgcctccagaaaataaaggtggaaaccttggggctgagttggcttgcaatcccttgcatggactacaaacaatataggctcagcccccttagggatggtctgaagtagccatgtctttctggccgacttcagcccccggcgaatttgaaagcggagaatcgattaaaaacgatccgatcacccgctcatttctgtgtttttagccgccgcgagcacctcgcagcagccattcccccattacagacgcgcctctgcttgcgcttgccggcgtactcggcgtcggcaaaggtcatctgcttcatcgggatcggcgtattaccggtatgagcgtcagtcgcaaagagcgtgagcccgcggtaatggactgcaagcccaccgcatggattgcaagctcgctcgcaattaatgtgagcccgcccccaccgtcagtcacagataatctgagcccaaaatcgcgctgattgcgagcccgacggttttcgattgcaagccgctacacatagctgcgccgcgcgtccgggtggccgggcatgtccagcccggcctagtcccgtacgtcgctcaggcacccttcggtactcgcgctcggcgccgacctggacgcgctagctggcggagcgcggcttgcgacgggtagcgaagcctttcaagggcgttgacgaaacgaaaaaatccccgcggcatgagcgtgacgcggggatccaggcgtaaatagagccttaaccgtgatagctgaaatggagcaaggggtgatgtctgcgtagcggaacacctcgcggggtggctgtgtatggctcaagactaagtcccgcgggccggcgggcctattcctcgaaggaggtaaggaggggtagcggaggagggacggcgattgacgatgtatactttttggtccagattggacgaaaagtataaaggcggatcaccgtctgtttcctgcccgggccgcgggcgcaccttcgtcacccctggagtcgtccatgatcaagtcgctgaacaccaagaacctgctgggaggcctgctgctcggcgtgctcgccagcggatccgccgtcgccgccgatggcaacctgcggatcggcatcgaggccgcctacccgccgttttccttcaagaccgccgaaggcgaactggccggcttcgactacgacatcggcaacgcgctgtgcgcgcagatgcaggtgaagtgccagtggatcgagcaggagtacgacggcctgattccctcgctgaaagttcgcaagatagacgccgcgctgtcctccatcaccatcaccgaggagcgccggcgctcggtggacttcacccacaagtactacttcacaccgggccgcctggtgatgaaggaaggcgcccagctcgacgacagcttcagccagttggccggcaagcgcatcggcgtgcagcgcggcgctaccgccgaccgcttcgccagtgcggtgctggccaaggccggtgccgaagtggtgcgctacaccagccaggacgagatctacctggacctggtggccggccgcctcgacgccaccttcgccgactccatcccgctgcagaccggcttcctcgataccccgcgcggcaagggctacgccttcgtcgggccggagttcaaggacccgaaatacttcggcgagggcgccgggatcgcggtgcgcaagggggacgccgagctggtcggcaagctcaacgcggcgatcgacgcgattcgtgccgacgggacctacaagcgcatcgagggcaagtacttcaagagcgacatctacggcgactgaccgctcgccggcggcggctgccgtcagtcgccgccttccttcagctccttgaggtgcttgtagaccgtcgcccggcccatgttcagcacgttggccacatagttggccgcgctcttgcccttgaacgcgccctcggcgtgcagggccaggaccagttcgcgcttgtgctcgcgggtcagcaggttcaagccgagctggcgctgccgcagccagccgtgcaggaaggtgttgatgcgctcctgccagtcgtcgcggaacagcgcgtccggttgcgggatcagcttgctcggcgagaggaacaggtcgagtgccgccttggcgctctcgaacaggctgatgttcaggttgatgcacagcaccgccagcggctggccggcggagtcgcgcagcacggtgctgaccgagcggatcttctgcccgtcccagttgagcttctcgtagggaccgatgttgcgctcgtcgctatcgtcttcgagcatgtcttccagcgccgagtcgtcgccgacctcgcgcttggacaggttgttggcgatgtagtcgacccgctggctgcgcaggtcgtgcaggaccacttcggcgtgggggaagaacagggtggcgatgccgtcggcgatcgcccggtagttctccaggctggggtcttggctcgggctcatgcgcaggaactctcgtgggacggcgggcgaggcgagtgtgccgcaaacccgccgccgggtcatcagggggacaggcggcgcggcgacagcatcgcctcgtccaggccgtgctcgcgcaggtgcgccggcagcggctggtggcggatcagcgcggcgctggcctcgcccatcgccgccgaggtctggataccgtagccgccctgggcagcgacccagaagaagccttccgcatcggcggcgtagccggccaccaggtcgccgtcggcgacgaacgagcgcagccctgcccaggtgtgttccgggcggcgaatggtgagggtggtggcttcttcgatcaggtacatgccggtggcgatgtccagttgctcgggctgcacgtcgtgggcttcgaccggatcggcgttggccggcgagccgagcagcatgccggcgtccggcttcaggtagaaggattcgtcgaggctgaccagcatcggccagtcgtggcagtcgatgcccggcggcggggcgaagatgaaggctgagcggcgcttgggctgcaggcccagcgggcggacgccggccagcccggcgatggcgtcgcaccaggcgcctgcggcgttgaccagcaccgccgcgcggtagttgccggcgtcgcagcggacttcccaggcgccgtcgacccggcggatctccagcgcttcgtggttgcacaggacctgcccctggttgcggcggatgccgcgcaggtagccctggtgcagggcgtcggtatcgatgtcggcaccggtggggtcgtaggtggcgccgaagaccttgtcgcgacgcagcaccggcacgatcgagcaggcctgttccgcgtccagcaggcgcatctgcggcaccagcgccttgccgctttcgtattggcggcggagttcttccggatcgtcgctgaagtcgaccaccatttccggacgcgggctgagcagcggatgctcgcagaagccggccggcgggttgtcgaagaaggcccggctggcggcggtgagcgcgcgcacctggggtgtgccgtaggccaccgtgtagtgcgcggcggagcggccggtggagtggtagccgggctgcgcctcgcgctccagcaccacgacccggccgtgggccgacagccagtagccggtggatgcgccggcgatgccggcaccgatgacgaggtaatccgcttcgatcatgctgctctcctgcatcacgcgatcagcctgcctggcgcaggcggtagagggcgttggccagggctacgtcttccaggcccaggccgatcgagcggaagaacgccgggcgccggtattccggacgtggcgcctggccgctgagcagttcggcgaggtcgccgcggatcgcctcggggctccagccatgctgttcggcggcgatcagcatctcgccggcggagcctggggtggtgtgccggtagtcgcaatagacgtccatggccgccaggctttccgccggtacctcatgggcgcggggcgcgttggtgctgatcgaggtgaccagcgccgggcgcttgagttggcgcgggtcgatcactgctcgggccgaggaggtgcagagcaggatcacatcggcttcgtccagcgcttcctccaggctgccggcggcttcggcgcgcgggtcgatggcgcgcaggctttgcaggcggcgctcgtccaggcacggcgaatggactcgcacgccctgccagtcacgcaggcccttcacgtattgcaggtgggcatgggctaccggtccgctgccgatcagcgccaggcggccggcttcggccggagccagggcatccaccgccacggcggtggtggcggcggtgcgcgcggtggtcagccgggcggcatcgcagagcagcaagggctggccggtctgcatcgacatcagcagggtccaggcggtgaccaacgggccctgttcgcgaacgatgtagggtgaagtcttgaccccgtagacctgttcctgggcgagcacgccgaggtagttgatgaagtcgccgcgaccggcggggaactccaccagttgctgggccggctggagcgcctggccggcggccaggtcgaggaacagctggcgcatggcctggaggacgtcgatacgggcgagcagttgctcggcttcggcctgctggacgatcaggggagtggcggcgctcatgcgatctccggaatggatgtaaacaatttgtccattctggactttaaggtattgccgggcaagcgccgacccgcctcgatgaccgacggcggcacctgcgtgtcgcagaaacgaaaaaggcgaagccggatggcttcgccttttttctccacgcctgcgttcagtgcttgcgcggtaccggcttgagcagttcggccggcggcatctcgcaggtgatcttgcggcccagcagttcttcgatcggcggcagggcgaaggcatcgtcctcgccggcgaagctgatcgaggtgcccgaggcgccggcgcggccggtacgaccgatacggtgcacgtagtcgtccgggtcctccggcagggtgaagttgatcacatggctgatgccgtcgatgtggatgccgcggccggccacgtcggttgccaccaggacgcggatcttgccttcgcggaagccttccagggtgcggatgcgcttgtgctgcggtacgtcgccggacatctgggcggcgctgatgccgtccttggtcaggcgttcctcgatgcggcggacttcgtccttgcggttggcgaagaccatcacccgttcccagttgttctgtgccaccaggttgtacagcagcttgtacttgtcgctgccggccacggcgtagacatgctgctcgacggtgtcgctggcgacgttctccggctcgatctcgacgatcgccggatcgacggtccactgcttggcgaggttcatcacgtcgtcggtgaaggtcgccgagaacagcagggtctggcgttcgcccttgtgcggggtctgccggatgatctgccggacctgcgggatgaagcccatgtcgagcatgcggtcggcttcgtcgaggaccatcacctcgaccatgtccaggtgcacctcgccgcgctggttgaagtccagcagacggcctggggtggctaccaggatgtcgcagaagcgcgcttccagctgcttgagttgcttgtcgaagtccatgccgccgacgaaggtcatcacgttcagcccggtgtacttggtcagcgccgcggcgtccttggcgatctgtaccaccagttcgcgggtcggggcgatgatcagcgcgcgcggctcgcccatgtagcgctctttcggcggcggggtctgcagcaattgggtgatgatcgagatgaggaacgcggcggtcttgccggtgccggtctgggcgcggccgatggcgtcctggccgcgcagggtgaagcccagtacctgcgcctggatcggggtgcagtaggggaagccgaggtcatggatggcgtgcatcaggctcggggcgaggttgaagtcgtggaagcgggtcttgccttcctgcggttcgaccacgaagtcttccagcttccagttgtccaccggcttcggcttgcgttcgcggcgcggcttgtcgctgcgcggcttggcgtcccggccttctttgccggcgggtttggcgggcttttcgcctttctcggccttttcagcggcgcgcggggcgccggactcgttgtcggcgcgcggggggcgcggtttgcgtgggcgtttctcggtcggcttttcgccggtgggggcggtacctttcgcggtagcgccggcagggccttgcgggaccggggaggaaccgctctgcggctgggttccgtcggccttgccgaagattttcttgagtgctttgagcacggcgatctcgtagtggttaaggaatgaacgggcgccagtgtaaagcatgttgccagcggggagaaatccatgcttggccggcgccctccagccctggccggacggggcctggagggggctgcgcgaagctcccggggcagccttcgggaggactcgtgcgcgcgaccggtggcgcgctacaaaaagacaacggtagggcgacgacgggggtggcatcttcgggacggtgccggagcgatccggcgagtgtccgcccactcaccaacggaagaacaagaaaaccatgaatccgtccccatcgatcgtcgggctgagcgatatcgaagccctggaacgcgtgccgctggaacagcgcgacctgccgtccagcacctacgaactgttgcaacgctcggcccagcgccacggccagcgtatcgccctgagctgcctgctgcatggcagcgccgccgaagaaccgttgcggatcagctatgccgagctgttcgcccgcgtcacccagaccgccaacgccttgcaccggctgggcctggaaagccaccaggcggtgtccttcctgctgcccaacctgccgcagacccactacgtgatctggggcggcgaggctgccgggatcgtcaatgcgatcaacccgctgctggagccggagcacatcgccgagctgatccgcgcctccaacacccgggtgctggtgaccctggcgccgttccccggcaccgacctgtggcagaaggtcgccggcctgcgcgcgcagttgccggagctgtacgcgatcgtcgtggtcgatccggccaacctgttaccggcgccgcagcgcgaggcgctcaaggcccagcgcgggccgctgccggagggcgtgctggacttcgatacgctgatcgccgactgcccggcagaccgcctggagagcggacgggcgatccatccggacgacgtcgcttcctatttccacaccggcggcaccaccggcacgccgaagctggcgccgcacagccacttcaacgaggtggcgatggccgagatcatgggcctgaacgccgactacggggtggacgacgtgctgctctgcggcctgccgctgttccacgtcaacggcgtgatggttaccggcctggcgcccttccatcgcggcgcccaggtgctcctggccgggccccagggctaccgcaatccgaccctgatccaggacttctggaagctggtggaacgctaccgggtcaccagcttcagtggcgtgccgaccatctacgcggcgttgctgcaggtccccagcgatggccgcgacctgtccagcctgcgtttcgccctgtgcggcgcggcgccgatgccggtggagctgatccgccagttcgaggcgcgtaccgggctcaaggtgatcgagggctacggcctcaccgaaggtacctgcggcaccagttgcaacccgcgtggcggcgagcgccggccgggttcgatcggcctgcgcctgccgtactgccaggtgaaggtcgcggtgctcgacggcgagggcaattacctgcgcgatgccgcgccgaacgaggtgggcaacctctgcctgaagggcccgacggtgttcaagggctacctgcaacaggaccggaaccgcgatatctggatcggcgatggctggttcaataccggcgacctcggtcgtatcgacgaggacggctacatctggctcaccgggcgcagcaaggacctgatcattcgcggtggccacaacatcgacccacagatgatcgaagaagcgctgcaccggcatccggccgtggccctggcggcggcggtgggcaagccggacgccaaggccggcgagctgccggtggcgtatatccagctcaagcccggcgccagcgccagcgaggaagagctgctggagcacgccagccgccacgtaccggagcgcgcggcggtgcccaaggatatctggctgatcgagagcatgccggtcaccgcggtgggcaagaccttcaagccggcgctgcgcctggacgcgatccgccgggtgctggaggaggaaagccggaggatcgccgaggatatccgcgtggaggtggtcgccgacgagcgccacggccagctcgcccacctgcacgttcccgcgcttgacgaaagacgccaggcggcgctggaagagctgctcggcggctacgcgctgaactaccggctgcacgccgtctgagagaagctccgggcgtcagaggcgcttgcgcagccaggcgccgatgtcgtggatttcctccagggacacctcgtggcccatcgggtagtcgtgccagcccacctccacgccctgcgcctgcaaggcgtcatgggccgcgcggccaagcgccgggtcgaccacgtcgtcctggctgccgtgcaggtgcaggaccggaatccgcttgtggcgctcgtccagcgccaggtcgtcgaaggtcggcgcgtaggtggatagcgccagcaccccgccgagcggctgggcgtagcggcggaaggcggtatgcaggaccaccgcgccgccctgcgagaaaccggcgaggatgatccgctcggcggcgatgcccttggcgcgctgttcatcgatgagagcgatgacctggtcggcggaggcgttcaactggtcttcgtcgatggcccgcgccggactgaaggcaaggatgtcgtaccagctcggcatgacccagccgccattgaccgtcaccgcctggctcggcgcctgggggaggatgaagcgggtgctcggcaggaccatctgcagggcttcggccaccggtttgaagtcggtacggtcggcgcccaggccgtgcagccagatgatacaggcgtcggcattcggggcatcgaggatcaggggttcgctcatgacggctccaggcagggggcatatgcgttcggaatgggaggaccattcgacaacaggcgctttcccgctcgcaagtcggccagattgtcgcagatcatgcattcgccaatttcgcgcggatgcgctttgctaagggaagtgcgccgggtacgccgttcgtcgcccgccgcggtcgcgccgccggctgcctctgccggtgccgcggcgcttgcggttacagtgcggcgaccggcccgggaagcgaccggcgcggggccggcggttcacccaggggcggcgaagggagtggcgaacagatgacaataatgaaaggtacctggctgctgctggccgctgtctgcctcggcgccagcgccacggccgaggccggtgcgacgctggatgcggtgaagcgcaagggctacgtgcagtgcggcgtcagcgacggcctgccggggttctcctacgccgacgccaagggccgtttcaaggggctcgacgtcgacatctgccgggcgctggccgccgcgctgttcggcgatgccgagaaggtgcgcttcaccccgctgtccgccaccgagcggttttcggcgttgcagtccggcacggtcgatctgctgtcgcgcaacacctcatggaccagctcgcgggataccgcgctgggcatccacttcaccggcgtcacctatttcgacggccagggcttcctggtcaatcgcaagctcggcgtgtccagcgcccgcgaactgaaggacgcgacggtgtgcatccagtccggcaccaccaacgagctgaacgtggcggactacttccgggcccacggcatccgttacaaggcggtgctcgacgacagctacgagaagagcgcccgtgccctggaggcggggcagtgcgacgtgctcagctccgaccagtcgcagctctacgcccagcgcctgaagctggccaagccggagcagtacgtggtgctgccggaagtgatctccaaggagccgctcggcccggccgtgcggcagggcgacgaagcctggttcaacatcgttcgctggaccctgtacggcctgctcaacgcggaggagctgggggtcacctcgagcaacgtcgagcgccaggccagagacagccgcaacccggacgtcgcccgcctgctcggcagcgagggcgacgctggcaaggacttgcaactgccgcgcgactgggtggtgcagatggtgcgccaggtcggcaactatggcgagatcttcgcccgcaacgtcggcgacggcagcccgctgaagatgccgcgcggcctcaacgcgcaatggaatctcggcggcctgcactatgcgccgccgattcgctgaccggcggggctggctgaactctcgccagcaccgacaatccgataacagacagacgcaccggtgccggtgcactatagagcgacgcgtcatgccgaacaccgaacaagagaaatgcccgtgaacctatcgatgactcccatcaacaaagccaaggcctggggcgtccacgccgtcaccgccagtggcgtgatcctggccttgctggccctgctcgcgctggtcgacaacaaaccccaggcctgcctgctctggctcggcctggccctgctggtggacggcctcgacggcaccctggcgcgcaagtacgaagtcaaggaaatgctgccgcatttcgacggctcggtgctcgacctggtgatcgactacctgacctacgtgttcatcccggccatcttcatctaccgctacatccccctgccggagcatttcgagctgctggcggtgggcgtgatcctggtttcatcgctgttctgcttctgcaacgtcaacatgaagagcaccgataactacttcgtcggcttcccggccgcctggaacgtggtggcggtgtacttctacgtgctcgacctgcacccctgggtcaacctcgccacggtgctggtgctggctgccctgaccctgacccggatgaagttcctccacccgttccgcgtgcgccagttcatgccgctgaacatcgccgtgactttcgtctggctgatcagcagcggtctgctgatcgttcagcagccggccgacctgccgatcctgctcggcctgtggttcgccgcctcggcctatttcgtcggtatctgcctctggcgcagcgcccgcgagtggttcggctgaaacgacccggcacgacggcgttcccgcctggggacgcctggcaagtccctatcatcgcaaggaaccccgcatggcccaccccaacgccgaactgatcgagcgcttctaccaggccttccagcgcctcgacggcgaggccatggcggcctgctacgctccccaggcgaccttccacgacccggccttcggcgaactgcgcgggcgcgaggtgggcgacatgtggcgcctgctgaccagccgggcgcgggacttccgcctggactacgcgaacgtccgcgccgacgagaacgaggggcgtgcgcaatgggtggcccactacctgttcacccagaccgggcgcagggtggagaatcgcatcgaggcccgtttccgcttcgccgacggtttgatcgtcgagcatcgcgaccagttcgacctgtggcgctggagccgccaggcgcttggcgccaagggcctgctgctgggctgggcgccgccggtgcagcgggcgatccgcgggcaggcgcgcaagggcctggccgcctaccaggctgcccatccggcggccggctgaggctgtcggtggccgaagcgcggataatctcctaagctcgccgcggacaacccgcaggacgccgcgatgatcacgctcttccagtttcccgccgcattcaacgtacccaatgccagtccctactgcctgaaactggaaacctggttgcgcctggccggcctggagtatcaggtgaaggtcgtcagcgacccgcgcaaggcgcccaagggcaagctgccctacgtgcgtatcgagggcgaggcgatcggtgacagcgagatcgtcatccgtaccctcggcgagcgctacggggtcactctcgacgccggcctggatgcccggggcaagggctgggcacgggcgatcacgcgcctgtgcgacgaacacctgtactacctgatgctgtatttccgctggttcgacgaggacagctggcgcgtgctcaagccggtgttcttcggctcgctgccattcggcgtgcgcgacgcggtggcctgggccatgcgccgcaaggtccgcgctaccctcagggcgcagggactcggggtccacggcagggacgaactgctggccttcgcccgcgacgacctcgatgccctcgacggcctgcttggccaggtcccgtactacggcggcgaacatccgtgcagcgccgatgccgccgcttacggtatcctcgccaacctcatcgaggcgaccctggataccccactcagccatgtggcgcgaggctatccgcgcctggtggcgtattgcgagcggatgcgggagcgggtctggagtgagtgaggcgacggccgccacggcggcgatcgggaagtgttggtcggtctacctggtgagggcggaaaacggcgcgttgtactgcggcatcagcgacgatccgctgcgccgcttcgacactcattgcagcggcaagggcgcgcggttcttccattccagccccgcccgcgcgctggtctacgtcgaggcctgcgccagcaagggcgacgccctgcgccgcgagcgggcgatcaaggccctgagcaagcgcgccaaggagcgcctgttggtcggcgtaccggtgttgcgcgaggtcggcgagccggcaatctaggacgttcatctgcggtcatggggtattcgtgggttacctgaagaatcattggtggaaacgctggatccgccgccgcggctgcaagctggccggcggcccggccagtgtcggcaagcgcaccacgctggtgctcgaggagcgggtcgaactcggccacctgcgcatcgtcccgccgaggctggagatcggcgcctacagctatgtgcgcagcggcaccgacctgtccctggtggcgtccatcgggcgtttctgctcgatcggctcggactgcttcatcggccaggaaaaacacacccatcccagcgactgggtgagcagccaccccttccagcacaccggcaccgcgctgcgctacgagccggcgctgagctacgcggaaatcggccacgacgtctggatcgggcacagcgcgatggtgatggaaggggtcaaggtcgggactggggcgatcatcgccacgcgcgccgtggtcactcgcgacgtgccgccctatgccatcgtcgccgggactccggcgcaggtgatccgctaccggcatccgccggagatcatcgagggcctgctcgcctcacgctggtgggagctggatagcgccttcctcaccggcctgccgctggaccgaccccgggagttcctcgccgccctggaggcgcgcgaggcgccgcgtgcggcgtaccggcggatgaccatcacccgccaggggtgccggctggattgagcgcgcccatcgccaggcccatcgggccaggcgatggggcgcccttcatgtcccggattgtcataggcgtgttttctcagccgcgctaagctggtgcctcacatccgcccggaggcgcccatgtcagagctgatcctgcatcactatcccacttcgcccttcgccgagaaggcgcgcctgctgctcggtttcaagcaactgtcctggcgttcggtgatgattccgccggtgatgcccaagccggacctggtggcgctgaccggcggctatcggaagaccccggtgttgcaggtcggcgccgatgtgtattgcgataccgcgttgatcgcccgtcggctggagcaggaaaaggcggttccggcgctgtttcccgaaggccaggagatggtcgccgcgagcttcgcccagtgggccgacgcggtgctgttccagcacgcggtaagcctggcgttcgccccggagtccatcgccgtgcgtttcggcaagctgccgccggaattcctcaaggccttcatggccgatcgcagccagctattcagcggcggcagcgccggccgcctgccgctggaacaggcgcgccaccagtggccggcattcatggcgcgactggagcgccagttgtcgcgcgaggacggcgatttcctgttcggcgaagcgtccgtcgccgacttcgccgtggcgcactgcctgtggttcctcaagggcacgccggtcaccgcgccgctggtcgacgattacccgcaggtgcaggcctggttgggacgggtgctcggcttcggccatggcgcgccagccgagatgagtgcggaggaagccctggaggtggctcgcggcagccagcccgtggcattgccggacgaatccttcagcgaccccaacggtttcctgcccggccaggcggtcgccatcgccgccaccgactacggtgtcgacgcggtacagggcgaactgctcttcgccggcagcgaggaactcatcctgcgccgcgaagacccgcgggcgggtaccgtgcatgtgcatttcccgcgcctgggctttcgcatcgaggcgcgttgaggcatgccggcggagaccccgccgctgcggccggacgccgatccgccgcagtgcgcgttgcccgaggcgaggccggaccgcgacgccggcaccaagctgcgcgccgcggtgctcggtgccaacgatggcctggtgtcgaacctgtgcctggtgatgggcgtggcgggtgcgagcatggcgcattcgtccatcgtcctcaccgggatggccggactggtgtccggtgcctgttcgatggccctcggcgagtggctgtcggtgaccaacgcccgcgagatggcgagcaagcgcatcgccgaggaagaacgcctgctcaggctctgcccgaacaccgagacccaggaactgatcgatatcttcaccgccaaggggctgagcgaggtgtccgcccggcgcgtggccctgcaactgatgaacgacggtcgtggcgcgctggacaccttgtcccgcgaggccctcggcatcgatccgacggagttgggcggcaacccgtggaacgcggcgggcacgtcgttcctgctgttttcccttggcgccctggtgccggtggcgccgttcctgttcctcgacggtgccgcggcgctggtcgcaagcctgctgtccagcctgcttgcgctgctgttcagcggcgcggtcacctcccgtttcaccgggcggccgctggcgttctcggcgttgcgccaggtgctggtcggtacccttgccgcggccttcacctatgggttgggcaccgcgctcggcgtgggcctgggctgaaagtccttcgcctgccggggactccgttttacactgcgacacccggccggcgtggccgggaacaggaaaaaccgaccagggagtggccatgaacgcctacgacatcgaaatcgtcaacgacgccgcgcacgccggcgaagccaaccacggctggtgcttcggcctgccgccgggcatccgtccggagcagtggccgctggatccggacaccggctatccgctgatgcacggcttcaccctgctgctgccggaggactaccgggtgcatggcccggagatcgtcgcgctgagcttcttctccctcgccccggaccagaacgacggtggaccgaccagcgtcgacggcattcgcgagatgctcatcgatccgcccgcgcaaccgccggccgaagcggaactgcggccgttctgggaggccgggcgcaatagccatccgcgtttgcatcggatggaggacatcctcggcggcgcctatgcgttgatcctgctcgacgccgctgaattcagcggcgcgccctgccagccgccggcgctgccggcgggtaacccgctgttggcgcagaccgagccgccgcagtggctggaggctggttcggcggccagcttcgtgccggactgggcggaggacgactactacctgctgcgcgccctcggtggccgcccggcggccggccaccagcaacgctacccgctgcgctggacggcgcgggcgcaagaccccaacgccggggtggtgcccagcgaatacggcgacggcggctaccagctgccgcactactggctggacggcaagatcgagcgcgacaactaccgcgagcatccctgggtggaagggcacctgccgaaccatatcggcggcaccatgcgtccggtgcagggcgtgccggagatgagtcccttctacgtagagttcgaggaatacctgggcggctacaacttcggcggcggcaacgcccagctcgatttccgcgacatgcgcttcgactgggcctgcggctgaggagggaaagggagcgccggcggcgctccggggcggcgcgggtcagtccttgcgccgcttgagctggtccttcaactgggtcggcaactgacggatgatcagcatgtcgcgctcttcgtcgtattccaccttggagcccagcaggtgcgcctcgaagctgatcgacaggccttcggcgcggccggtgaagcggcggaactggttgagggtgcgcttgtccgccgggatttccggcgacaggccgtagtccttgttacggatgtagtcgtagaacgcccgcggttgctggtcgtccatcagttccgaaagcgcgtcgagggtcatcggctcgccgatgcgcgcctgggaggtggcgtagtcgaccagcgtctcggtcttctcgcgggcctgttcctcggccatgtcctcgctttccacgaaatcgctgaaggctttcagcagggtgcgcgtctcgctcggcgaatccaccccttcctggcagccgatgaagtcgcggaaatagtcggagaccttcttcccgcccttgcccttgatgaacgagatgtactgcttcgactgcttgttgttgcgccattcggagatattgatccgcgcggccaggtgcaactggccgaggtccaggtggcgcgacggggtgacctccagcgactcgttcaccgccacgccttcgctgtggtgcagcagggcgatcgccaggtagtcggtcatgccttgctggtagtgggcgaacaggatgtggccgccggtggagagattggactcctccatcagcttctgcaggtgctcgaccgcttcgcggctgaagccgacgaagtcgcgatcgccctccaggtactcaccgagccagccgctgaacgggtaggccccggactcgccctggaagaagccccaggccttgttcttggcgttgtagctttcgttgaggtcggccagcaggttctcgatggcctgggagtcgcccagctcggcgtcgcgcgcgtggagcacggccggggtgccgtcgggcttcttctcgatcaggtggacgatggcgtgatggatcggcatgtcaggttcgacctttcaggtaatcggcggcgccgcgcaggtttccgcgacgctgcgggacacgccgctggcgcgcccgcggatcggccagtttacccgaggttgccggcttctgcctgcgtcgcctggcgttcctgcagaccgtgcaggcgcttgatcacgaagttcaggtgcaggtgcagctcgtacagctcgtggtagtaggagagcggcacctccacggtgttcagctcgctctccagtttctccagccgctcgatctcgcttctcagttgctcggcgtcggtaccgctgtcgagcttgcggtcgatgtcgcggatgtagcggtaccagcggtagatgcgcgcgcggatgcgccagcgatacagcgggccgatagacttcatcagcgggatgaggatggcgatgaacgggatcagcaggatgatgtagcggtccgccagggaggcgatgcggaacggcaggtagcgctgcagcagcggcaggccgctcttgtagtagcgctcggcgtcctcgtgcaggcgcagggtgcgcggctcggcgctggggaaggcgccgggcttgtcgagcaggctgccgtccttcatcacctcgcgcgcggcttccagcaccagcgggatcagcgccgggtggaagcgttcgttgatcaccagggtggccaccggcgacagggtgctgatgtttcgttccggcacgttgcgcggcaggttgagcaggccttcgccgacctcgacccgcttgaggaacggcaggcgcgcctcgtaggcggcgctgcggcggaagttgaccaggcgaagctggtcgttgtcggccaatttctggatcgccgggttctccgccgggccgacgatgaacgccgcgtccagcttgccggccagcaggtcgtcgaccaccgcgttgccgccgcgggcttcccaggtgatcggatagtgtcccggggcgatgtcgttggcctgcaggatcgcctcggtggcggcgcgggtgccgctgccgtcgctgccgatggccaggcgcaggtgcagcaggtcgctgagctggtcgatgtgcacgttgctgcggtggaacagccagagcggttcctggtagaccgcgccgagggtctgcaactggcgcgcctgcccggcttcgagctggcgctcctggccgctctggaccagggcgatgtcgacctcgccggtgccgagcaggcgctccaggttgtcgcgcgagccggcgctgggcaccagcttcagttcgaagccctgctccttgagcttttcccggagcttgccggcgaacacggcgtagccgccgccctcggcgccggtggccatggtcgcgctcatcggcggcggcggggcgacgaaatagaacaccgcggcgaccagggcggcgatcaccgggatcagccagaggttggcgcggatcaggatggcgaggtccttgagcaggtgcttgatgcgattcatgagcggtccttgtgctgctctccagaagggtatgacggatgcgggcgggcgcactcctcagcgtagccgagggtcaccggcggtccgtgcggaactgccggcagagcacccggtggcgatgccggaagatgcgggtgaggaaccagcgtaccagtccggcggcgaatagcgggcgcacggtcaactggtcgaccagcaggcattccccggcctcgcccggtgtcggcaggatgcgtcgctcgtggcgccagaggcgcatgccggtcatcggcgactgttcgatgaagccgtggccgggcgtcagctccagcagggtcagttgcgaagtgcccagcggcagcaagccgaacaggcgcatgtggctgcggaacagcgggcgccggggcactacctccaggtcttcgaggctgcggataccgggcggtacgctcatgctcagcaacgggcgtatctcgcggagtattccgtccaccgaggtgatccaccgccagagctgttcggggctggcctgcaggcgcgattcgaaatgcaggctgatattcatcgcaggctcctgctagggttgtgggaggacgcgctgtccatggcgcccgtgccgtgcaagcctaagccagacgaaccgagacgtcgaaccgaaggaggacgccatgctaatccgcgccgcaacctcgaccctgctggtggtcgatatccaggaacgcctgctgccggccatcgacgacggcccggcgctggtcgagtacagccagtggttgttgcgcgtggcccgcgcactggacgtgccggtgctggccagcgagcagtacagcaagggcctggggccgacggtggcggcgctgcgcgatgagctggacgccacgcagatcctcgagaagctggacttctcggccgccgccgacggcgccctgctgcgcgcgcccggcggcgaccgccggcagttcgtggtttgcggcagcgaggcgcacgtctgcgtgctgcagaccgtgctcgacctgcttggccgtggtcgcgaagtgttcgtcgtggaggaggcgatcggctcgcggcggccgagcgacaaggcgctggccgtggagcggatgcgccaggccggggcgatgatcgtgtcgcgggagatggtcgccttcgaatggatggaacgcgccggcagcgaccgcttccgcgagatcagccgcaacttcattcgctgagcggcggttgctcggcctggtagcgccgggcctcctcgcgcagccagtcggcgaaggcatggtggcggtcgctcggcggctcgcgctgcggccagaccagccagtagggataggggtagggcacgcggatgtcgcccagttgcaccaggcggccctcggcgagggcgccggcgaccaggctgcgacgctccagggcgatgccctggcccaggcgcacggcttccagcagcaggttcgagtcattgatcagcagtccgtgctgcggttccgccacgccggcgcgctggcaccagagcgcccaggattcggtggagcgcagtgtagggcaggcgacgatctcgctcggcgtgcgcggcaggcggccgccgttgaagtcgggcgcggcgaccatcaacaactcgtcgtcgaacaggcgttcccgaccgaccccttcccagtcgcccttgccgatgcgtacgccgaggtcggccaggccctggcgcaggttctgcacgtcaagactggccaccagccgcacgcgacagtgcggatggcgctcgcgaaagcgcggcaggcgcggcagcagccagttcaggccgaaggacggcatcaccgtgaccaccagctcaccctcccgtggacgcgcccgcaccacccgcgtggcgtcggcgatctcgcccagagaggcgcgtacctgcagggcgtagaaccggccgttctcgctcaggcgcaggccgcgcccctcgcggacgaacagggccaggccgaggaggttttccagcagcttgatctgctggctgatcgctgagtgggtgacgtgcagctcgctggcggcctggctgatgctgccgagccgggcgaccgcttcgaagctgcgcagggcggtgaggggagggaggtcgctcatgtaagtttttctaaaggattcgctgaatttatctcgatatttttcgcgttgtgcaacgactagagtgattttcccaggcgtcgccctcttagcggcgcttaatcatcgacaaaggatgccgcgatgcaactgatcggtatgctggattcgccttttgtgcgccgggtcgccatcgccctgcgcctgctggacctgccctacgagcaccggccgctgtcggtgttccgcaatttccaggcgttcagcctgttcaacccgatggtcaaggcgcccacgctggtgctggacgatggcaccgtgctgatggactccagcctgatcctcgattacctggagtgcctggccggccgcgaacgcagtttgctgccgcaacggccgcaggcccgtgcacgggcgttgagtctgatcggcgcggcgctggtggcctgcgagaaatccgtgcagatctactacgaactgaacctgcgtcccgaggaacgccgccacggcccctggctggagcgggtggaggggcagttgctggcggcctacgactggctggaggcagcgctgcgccaggagccgctggcacgcgacggtggcatcgagctggtcggggtgaccgtcgcggtggcctggcgcttcagccaactggtggtcgcggagcgggtcgccgccagcgaatacccggaactggcaagctattcggattatgcggaggggttgccggtgttcctcgagacgccgccggtctgagcccgcgaggcgccaggctggcgcccctcgaacggctcgattccgcctgcgcccggcctcggttcgctgcaggtcgctgccgtcgtcacggcccggaccggttgttgcgaactgctgttcggcgccggcctggagacggcctggccctggctcagcctggtcctgagcgcggccctcggcttgctcttcggcatgctgctgggcgggctctggttcggctactggatccgccaggagggattgcaactgacccacctgctgctggtggtctgggtgctggcgaacttcttcgtgctcaacgtccgctggaactgatggggactgccggtacgaggagcaggacgcgaggacggcgacaatggagcgagccggacgcccgtcgatagcgcgaagtcgcatctcgctcctgccacccgatccctcggctcccctctgttcgcacgcgctgcatgggctgacgcagctggaactgcccccgggcagtggcagccggctgcctcgagggcaggtgctccggctggctcggcatggtcactggagttcagccccggggttcttcgaggaaagcagaacctgcggcatcggctcctttcgcccgactgggctcagcgcagctcttcggcggcggcgaccagttgttcgagttgatggtggatctgggccctgtccagcaactgcaagggctggcggttccagagcagccgttcgccgctttcggggtcgcggcccaggatcggcttgcaagggtcctggctgaacaggttctgctcgctggccgtagcgtctccttgtccttccaggcgggtgaacatcaacaggtgatcggtcggatgttctgccagatggcagagatgcgggcccacctgcaggctgagtacgctctcctcgtcgttgggcgtcgggagatcgagagcgagaaaaagctggtggatggcggcgcggtagagtggattcatggcgtgttccgagtcactggaggcggccattagagcagtgccagcccggagagactgttaatcgtggttctctttttttaggttttgccgctgccgattccagtgaaaaaacggcggccaatcctgataggcgatggggtttcccgttcctagactggcggagaaacatcaggagaaggcaaccatcatgcatattcaatcgcttcagcagagtccgtctttcgccgtcgaattgcaccaggccgccagtgggcgtttgggacagattgaggcccgccaggtcgccacccccagtgaagcgcagcagttggcccagcgccaggacgcgccgaagggtgaggggctgctcgctcgcctgggcgcggcgctcgtgcgtcccttcgtggcgatcatggactggctgggcaaactgttgggctcccacgcccgcaccgggccgcagcccagtcaggacgcgcagcctgcggtcatgtcctcggccgtcgtgttcaagcagatggtgctgcagcaggcattgcccatgaccttgaagggactcgacaaggcgagcgagctggcgaccctgacaccggaaggactggcccgggagcactcccgcctggccagcggagatggggcgctgcgttcgctgagcaccgccttggccggcattcgtgccggcagccaggtcgaggagtcccgtatccaggctggccgcctgctcgaacggagcatcggcgggatcgcgctgcagcagtggggcaccaccggcggtgccgcgagtcaactggtgctcgacgcaagcccggaactgcggcgcgaaatcaccgaccagttgcatcaggtaatgagcgaggtcgcactgttgcgccaagcggtagagagcgaggtcagcagagtatcggccgacaaggcgctggcggatggcctggtgaagcggttcggggcggatgcggaaaagtacctgggcagacagcctggtggcatccacagtgacgccgaagtgatggcgcttggtctctacaccggcattcactacgcggacctgaatcgcgctctgcgtcaggggcaggagctggatgcgggacaaaagctgatcgaccaaggtatgtccgcggccttcgagaagagcggacaggctgaacaggtagtgaagacttttcgtggcacccgtggcggggatgccttcaacgcggtggaagagggcaaggttggccacgacgacggctatctctccacctccctgaaccccggtgtcgcgaggagcttcgggcagggcacgatatccaccgtgttcggcaggtccggaatcgatgtcagcgggatatcgaactacaagaatgaaaaagagattctctataacaaagagaccgacatgcgcgtgctgctgagcgccagcgatgagcagggagtgacccgccgggtcctcgaagaggcggccctgggggagcagagtggccatagccagggactgctcgatgctctcgacctggcaagcaaaccggaacgttcaggcgaggtccaggaacaggatgtacgcctgaggatgcgtggccttgatctggcctgaccgatcgtagaagaaagacgtcacgaacggacaccttggggtgtccgattcttggctcggcagcggatccgggtggagaggcgtgctggctattcgcccagtggttccaggagggctgctgtccaacgctccttgcgccaggcccggcgctgcttcttgtcgaggtaggtccaggcgacgaagcggctctgcttctgtccctgggccatgtccaccacgcggatatcgctggcgcccaacgtcttcaggcgctcctggaggttcggcaggttgctcgccttggataccagggtggtgaaccagaacacctgcgtggcgaacgcccggctttcctcggccatgccggccaggaaggccgcttcgccgccctcgcagtacagctcggcgccctggccgccaaagttcagtagcggcagggtacgggtcgggtcgagcttgccgaggttcttccacttgcgccggctgccgcgcgtggcttcgtccagcgaggcgtggaagggcgggttgcagagggtcatgtcgaagcgctcatcgacgccgatcaggccctggaatatctgcctgcgatcaggctgccggcgcaactcgatggcagcggcgaagcgtgggttggcggcgaggatcgcagcggccgaggccagcgattgcgggtcgatgtcggcgccgacgaagcgccagccgtattcgtggtggccgagcagcgggtagatgcagttggctccggttccgacgtccagcgcacgcaggccgggaccgcgtggaatcaggccatcgtggctggcgccgagcaggtcggccaggtagtgcaggtagtcggcgcgaccgggaatgggcgggcacaggtaaccatcgggtatattccactcgcgtacgtcgtagaactgttgtagcagcgcgcggttgaaggctttcaccgccgccggatcggcgaagtcgatgctctgcctgccgtacggattgaggatgacgaagcgctccagttccgggctgccggcgatcaggcgcggaaagtcgtagcgtcccaggtggcgattgcgcgggtgcagcgggctggcgctcttgcgctcggcgtcgggatgcgggctggtcgggcggggcatgttctcggtttccgtgacggcgaggcgggcattattcacatccgccggaggctggccagtgtttctgccgagcggcgcgctcctggcccggtcacaatggaaacagccacggaatcaccagcacgcagacgaacatcaccagcagggtaaatggcacgccgatccggacgaagtcgccgaagcggtattggccagggcccagcaccagggtgttcaccggcgaggaaatcggcgtcatgaaggctgccgaggccgccaccgccaccaccatggcgaaggggtagggcgaggcgccgatctgcttggcggtggcgatggcgatcggcgccatcagcaccgcggtagcggtgttggagatgaacaggccgatggccgcggtgagcaggaacaggctggccagcagcacgcgcgggccggcgtcgccgagggcgtcgaccagcagcgagaccaccaggtcgataccgccggtcttctgcagggccagggcgaagggcagcatgccgacgatcaggaccaggctttgccaatggatggcgcggtaggcgccgtccatgtcgatgcaacggaacaggcccatcaacaggcagccgaccagtgccgcgaccacgttgggcaccaccccgctgaccatcagcgccaccatcacggccaggctgagcagggcgtgcggcgccttgctcagggccggcgccacctcgtcgatctccgccggcaggctgagcaccaggaaatcgcggttgcgtccctgcaactggcggatcgccttccaggcgccgatcaccagcagggtatcgcccaggcgcagcttctcttccagcatgccgtcggtgagcgcttcgtggtcgcgacgcaggccgaccacgttgagcccgtactgcgaacggaagcccagttccaggacgctcttgccgagcagggtggagtccggcggcagagtcacctcggccatgccgacctcccgcgactggtcgatgaagtagctggcgcggaacggcaggcgcaccaggttcagctcggcgcagcgccggtccatgtcctccggaggggcgaagacgtccagcagcaacacgtcgcccgccttcagctcggtgctgccgccgaccttgaccacctcgctgtggaacttgcgtacccgctccaggccgaccacgttggcgcccaggcgggtgcgcagttgcagttcttccagggtgctgccgatcaacggcgagccgagctggacctgcaggcgccgttcgcggccggccaggcgatagtcgcggatcaggtcgcgcagggtccgccgtgccttcggcgcgccgacttccgccgggctggcggcgttcagccagttgcgcgtgagcagcatgtaggccacgccgatggcgagcaccacgaggcctatcggggtgaaggcgaagaagccgaagccggcatgaccctcgcgcgccagctcgctgttgaccaccatgttcggtggcgtggcgaccagggtcatcatgccgctgatcagtccggcgaaggccagcggcatcatcagccggcccggagggatcttcagcttggcggcgatgctcaggaccaccgggatgaagatcgccaccaccccggtggaactcatcaccgagcccaacccggccaccgccagcatcagcagtaccagcaggcgcgcttcgctgctgccggcgcgggcgatcagccagtcgccgacctggtaggccaccccggtacgcaccaggccttcgccgatcacgaacagcgcggcgatcagtatcacgctgggatcgctgaagccggccagggcttcgttgagggtaagggttccgctgacgctgaaggccatgatcaccagcagggcgatcacgtccaggcgcaggcggttgtggatgaagagggcgacggtggtggcgagcaggccgaccacccagagcagttcgaggttcatgcgggcatctgagcgggaggatgcctgcgagtgtggcagacggacgcggatcgcgccttgatctgctgcaggtcgacggcgcctccccgcttcgccgcggagaggcgccgcggccctgtcagccgaggaggagggcgtcgtcggcgagcttctcgccgcgcaccttctcgaacatcgccagcaggtccggtacgtcgaggcccttgcgttgctcgccggagacgtccagcaccacctggccctggtgcagcatcaccgtgcgctcgcccacgtccagcgcctggcgcatgctgtgggtgaccatcatggtggtgagtttcttctcggcgacgatccgtgcggtgagatgcaggacgaagtcggcggtgcgcgggtcgagcgccgcggtgtgttcgtcgagcaacaggatacgcgacggctgcagcgccgccatcagcaggctgacggcctggcgctggccgccggagagcaggccgatgcggtcgccgaggcggttctccaggccgaggccgagggtcgccaggctttcccggaaaccgtcgcgcatcgatgcctgcaccgccctgccgaggccgcgaccggcaccgcgacgctgcgccagggccatgttctcctcgatggtgaggtcctcgcaggtacccgccatggggtcctggaacacccgcgcgacgcggttggcgcgggcccagaccggcttgcgggtgacgtcttcgtcgtcgatcaggatctgcccgctgtcgatcggcaggtcgccggagactgcgttgaggaaggtcgacttgccggcgccgttggagccgatcacggtgacgaactggccggccgggatgtccagcgacaggccgcgcagggcgcgggtctcgatgggggtgccggggttgaaggtgatcttcaggttcttcgcgctgagcatggtcaggctcccttcttgccgagcaggcgtttcttcatcatcggaatcaccagggcgacggtgaccagcaccgcggtgaccaggttcaggtcctgggcctgcaagccgatgaaatcgctgttcagcgccagggcgatgaagaagcggtagacgatggcgccgaggatcaccgcgagggtcgccaggatcagccggcgcgagggcaggatgctctcgccgacgatcaccgcggccaggccgatgacgatggtgccgatacccatggagatatcggcgccgccctgggtctgcgcgaacagcgcgccggccaacgccaccagcgcgttggagatggccatgccgagcaggatcatgccgccggtgttgaccccctgggcacgggccatccgcgggttggagccggtggcgcggatcgccaggcctttctgggtggtgaagaaccagtccagcagcagcttcgcggcgatcacgatgaacaccagcagcagcgggcggagcacgtagtcgctgagccattccggctgcagcagggtgaacaatgtcggctcggcgatcagcggtacgttgggcttgcccatgatgcgcaggttgatcgagtagagcgcgatcatcatcaggatgctggcgagcaggtccatgatcttcagcttgacgttgagcaggccggtggccagcccggccagtgcgccggctgcggtggccgccagggtcgcgctgtacgggtcccagccgagggcgatgagggtcgcgcagaccgcgccgccgagcgggaagctgccgtccaccgtgaggtcggggaagcgcagcaggcggaaggagatgaacacgccgagtgccacgaggctgaagatcaggccgatctccagggcaccgaacagggaaaacagagacatgacttcgtaaccgagtgcgtgaaggcaggattatcgtgccgtccggccacgggcggaacgcccgcggccggcggccgctttttttacttgatgacttccgcggccgacttgagcagttcgtcggacagggtcacgccttgcttctgcgcggccccgggattgacgaacagctgcaggttgtcgctggtctccggcttgatctcgcccggcttctcgcccttgaggatgcgcaccaccatgcggccggtctgcttgcccatctccttgtagttgatgccgagggcggcgatggcgccgcgcttgacgctgtcggtgtcggaggcgatcagcgggatcttcgcatcgttgccgaccttgaccagcgcctcgtaggcggacaccacgttgttgtcggtgttggtgtagatcgcgtcgaccttgccgaccaggctgcgcgccgccgagctgacgtccaccgaacgcggggccgaggcttcgaccaggctcaggcccatcttcggcagcagttccttcagctccttgaccaccaccacggagttggcttcgcccgggttgtagaccatgccgatgcgcttggcgcccggcaccactttcttgatcagctcgatctgcttgtccagcgcgagcatgtcggaaaccccggtgacgttggtgccggaggcttcccagctcggcgtcaggtgcgcgccgaccgggtcggtgacggtgctgaagacgatcgggatgctcttggtcgcggccaccagcgcctgggccgacggagtggcgatgccgacgatcacgtcgggcttgtcgccgatgaacttgcgggcgatctgcgcggcggtgccggtgttgccctgggcgctctggtactgccacttgaggttcttgccgtcttcgtagccggcctcctggagggcctccttgaccccgtcgcgagcggcgtccagcgccgggtgctcgacgatggcggtcacggccaccgacttctgctcttcggcgttggcgccgaaggacagggccatgccaagggccagggcactgaggggcaaccatttattcttataggcctgcatcatgcggcgatctcctgattgtattggcgcgctgtagcgaattgttctgattgggcggtgcgggtacagcgtggccgaaacatcgcatttttcgcgcaagtcgtcagcaggtttgatgttttttcttgcggtgggattaccgctgggggtgatccgggtaaggtgtcggcgtcggaccgtgaccgaaaggaggcgacatgctcacgaccatcggccgtttttcccatcccctggaggcgcagatcgctcgcgcccgcctggaggccgctggaattccggcgttcgtcgccgacgagcacaccatcaacatgcagtggctgtactccaacgcactgggcggcgtgcgcctgcaagtgcccatggtctgtcgcgaagacgcggtggcgctgctggccaccgatgaaagcgaggcgctgcgggccgagcagggcagcagcgagttccagtgcttgcgttgtggcggcgaccaggtggcctggaaggtggacggccgccgcctggccttccttgggatcctgctgctcaacgtaccgctgtggccgatccggcgtcggttggtgtgcgaggtctgcggtttccgcagcgaagtaccgatgcctctaagcgagtgaaagcaaaacgcccgcctctgggaggcgggcgctggagttagagcgcggcgatcttttgccgttgctcggccagcttggccagggcctgttcggcctcggctagcttggcgcgttccttctcgatcacgtcggccggggccttggcgacgaagccttcgttggacagcttgccgccgacgcgcttgacctcgccttccaggcgctggatctccttgtccaggcgccccagttcggcgctcttgtcgatcaggccggccatcggcaccaatacttccatgtcgccgaccagggcggtggcggacatcggcgcttcctcgccggcttccagcacgcggatgctttccagcttggccagtttcatcagcagcggctcgttgtcggccaggcggcggtggtcgctgggcgaggcgttcctgaggatgatgtcgatgcgcttggccatggagatgttcatctcgccgcggatctgccgcacgccgagcatcagcgccttgacccactcgatgtcgccttcggcggcggcgtcgatcctgccttcgtcggccaccggccagggttgcagcatcagggtcggaccttccttgccggcctggcccttgatgcgctgccagatttcctcggtgatgaacggcatgaacgggtgcgccaggcgcagggccgtctccagcacgcggatcagggtgcgacgagtgccgcgctggcgctcgataggggcgttctcgtcccacagcaccggcttgaccagctccaggtaccaggcgcagtactcgtcccagatgaactcatagagggcctgggcggccaggtcgaagcggaaggcgtcgagctggcgggtgacttcctgctcggtgcgctgcaactgggagatgatccagcggtcgaccgaggacagctcgatcggctcgccgttgaccccggtgtcctggccatcggtgttctcgatgacgaagttggcggcgttccagatcttgttgcagaagttgcggaagccttcgacgcggcccatgtcgaacttgatgtcgcggccggtggaggccagcgagcagaaggtgaagcgcagggcgtcggtgccgtagctggcgatgccttcggggaattcggcgcgggtctgcttggcgatcttctccgccagcttcggctgcatcatgccgctggtgcgcttttgcagcagggtatcgaggtcgatgccgtcgacgatgtccagcgggtcgagcacgttgcccttggacttggacatcttctggccctggccgtcgcgcaccaggccgtggacatagacggtcttgaacgggatctgcggggtgccgtcggggttcttcaccaggtgcatggtgagcatgatcatccgcgcgacccagaagaagatgatgtcgaagccggtgaccagtacgtcggtggggtggaaggtcttgaggaactcggtctgctgcggccagccgagggtggagaaggtccacaggccggagctgaaccaggtgtcgagaacgtcttcgtcctggcgcaactcgacctcgttgccgagcttgtgcttggtgcgcacctcgacctcgtcgcggccgacgtagacgttgccggcctcgtcgtaccaggccgggatgcggtggccccaccagagctggcggctgatgcaccagtcctggatgtcgcgcatccaggagaagtacatgttctcgtactgcttgggcacgaactggatacggccgtcttccacggcggcgatggcgtcttcggccagcggcttggtgctgacgtaccactggtcggtcagccagggctcgatgacggtgccggagcggtcgcccttcggtactttcagcgcgtggtcgtcgaccttctcgagcaagcccatggcctcgaactcggcgacgatggccttgcgcgcggcgaagcggtccatgccggcgtagctctgcggcaggctggggtcgaggttcgggttgacgctgccgtcgaggtggaacacctgggcctgggccagcaccgcggcgttcttgtcgaagatgttgatcagcggcaggtcgtggcgcttgcccacttcgtagtcgttgaagtcgtgggccggggtgatcttcacgcagccggtgccgaattcgcggtcgacgtactcgtcggcgatgatcgggatgtgccggccgacgatcggcagttcggcgaactggccgatcagcttggcgtagcgctcgtcttccgggtgcaccgcgaccgcggcgtcgcccagcagggtttccggacgggtggtggcgaccaccaggtaatccaggccttcgctggtcttcgcgccgttcaccagcgggtagcgcaggtgccagaggtggcccttctcgtcgtggttttccacttccaggtcggaaatcgcggtgtgcagcttggtgtcccagttcaccaggcgtttgccgcggtagatcaggccgtcttcatgcaggcgcacgaaggcttccttgaccgcttcggagaggccgtcgtccatggtgaagcgctcgcgcgaccagtccaccgaggagcccaggcgacgaatctgccgggtgatgttgccgccggactgttccttccattcccagaccttctccaggaacttctcccggccgaggtcgtggcggctcacgccctgggcgccgagctggcgctcgaccaccatctgggtggcgatgccggcgtgatcggtgcccggctgccacagggtgttgcggccctgcatgcggcggtagcggatcagcgcgtccatgatcgcgttgttgaagccatggcccatgtgcaggctgccggtcacgttcggcggcgggatcatgatggtgtagggctggccttcgccgctcggagcgaagtagtcgttggactcccaggtctcgtaccaggaagtctcgatggcgtgcggctggtaagtcttgtccatgcgaaaggggaccaaagctgaatatggctggggaaaatgcgaagaaagtccgggagtatagcggggatggcggcccgggggtaaggccgcgggccgcggcgggcgcccgccgcgtccggatcagccgttgcgttggccgagcaggcgacccaggcgggcttgcaggcggcggcgcagttcggcttcgatctgcggggcgaagtcgtcgatgacttcctgcaggatcagttcggcggacgctcgcaactcgtcgtccaggcgctcctgttcggcgggcgccagccctgccgtggtggctgccgcggtctgcggctctggcgcgcgcggggcggtaccgggggagacgacgtcggagagcaggggaatgttgtccggctcgaaggattcggtcagcaagggcggctcgttccgttcgtagagcaggtcgtggatcgactccaggtcatcgagcaactgctccgggggttgtgtcggtttgtggctgtccatggtcgtgcacttcagatacgcggcaggcgatggtcctgtagaggatagccctgctcccggtagaagcggaatttatcccgtgccgcctggcggatcgccggctcctcgaccaccagttcggccacccgcgaaaagttcgggacgaagccgggggcctcgagggtcaggttgatcagcaggtcgcgatggttccccgggggctcgcccaggcccagggcgacgggcgcctcggcgtcttcctcggccaggctgtgaggaatgaaggcctcgccgcggaagctccacaggcggccgtccaactcgctgcgctgcgcctcgtcggcgcaatgcaggtagacctgcatgccctgccgccaggccttctcggccaggcggcaggcgacctgcaggcgcgccgacggatcggcgctggggatcacgtagaaatcgacccgggtcacttggcccgttccagcaggtactgggtcaacaacggaaccgggcggccggtggcgcctttgtccttgccgccgctgatccaggcggtgccggcgatgtccaggtgcgcccagtggtatttcttggcgaagcgcgagaggaagcagccggcggtgatggtgccggccttcggcccgccgatgttggcgatgtcggcgaacgggctgtccagctgttcctggtattcgtcgaacagcggcaattgccaggcgcggtcgtcggcgaactcgccggccttgagcagttgcctgaccagcgcttcgttgttgcccataaggcccgaggtgttgctgcccagggcgacgatgcaggcgccggtgagggtggcgatgtcgatcaccgactgcggcttgaagcgctcggcgtaggtcagtgcatcgcacagcaccaggcgcccttcggcgtcggtgttgaggatctcgacggtctgcccgctcatggtggtgacgatgtcgcccggacgggtggctccgccgctgggcatgttctcggcgcaggccagcaggccgaccaggttgatcggcaactgcagttcgagcaccgcgcggaaggtgccgaagacgctggcggcgccgcacatgtcgaacttcatctcgtccatgcccaggcccggcttgaggctgatgccgccggtgtcgaaggtgatgcccttgccgaccagcacgtgcggggcctggtccttcttcgcgccgttgtattgcaggacgatcagccgcggcggctggtcgctgccctgggcgacggcgaggaacgagcccatgcccagctcgcgcagtttcttctcgtcgaggacctcgaccttcaggcccttgaactccttggccaggcccttggcctgctcgccgaggaacgtcggatggcagacgttcggcggcaggttgccgagatcacgggtcagggccatgccattggcgatggcctgggcttccttgctgccttgctcgacggcggcgctgtcggccttgtcggcgagcagggtcagcttcttcagtttcagcggctcggctttctggctcttgtagcgatcgaacacgtacaggccatcggccagggtttccaccagcagacgcgccttcgcgtgggcatcgcggcctttcaccgcgagatcgccgagggccagcgcggcatcggcgccggccaggcccttgagggtcgacagcacggcggaggccagcttgcggtactggcggtcgcccagttcgcgctccttgccggcgccgaccagcagcacgcgctcggccttgagattgggcaggctctgcaggagcagggtctggccgaccttgccggccaggtcgccacgcttgagcactgcgctgatggcgccgccggtggcgtcgtcgaccgccttggcgctggcgccgagcttgcggccttcgcctacggcgagcaccagggtggcggttttcagggtttccgggcgtacgcttttaacaaggaattccatggaagaggtccccaatacagacagtcgggatggcgcaaggggcggcatccgttagcggtaagcgattgttccgagcacgattcgtcccgaggactgacggtcgccgccggggcggtgacgcaggcagcgacagcttagtcgttgcggcgggggtcgttccatgccgaggatggcaaccgaggttctacagcgccggagccgggttggcggtgcctcccggccgttgccgcacatggtcgcataactgcggcgtgtctggcacgactgtgtacgcacgggaacccgcggctatgctgcgtccctataatgaacgtttcgttccgcaggagtcgcaccgtgcccgccagcaaacctgtcgcggatcccgcccggagtactgacccacgcgattaccagcgagtcggccggccgctcggggtcatggccaagaccttcccggcgggtttcgtggtcgccgagcatcggcacgagcgggcgcagttgattcatgccctgtcgggcgtgatcgaactgcatgtcggtcgcacgctatggctggtcccgccgcagcgcgcggtatggatgccggcggggatggcgcacgcgatgctggcgcgcggcgaggtccgcttgcacaccgtctatgtccggccgcagtcctgcccgccagaattcccccgggtgccgcgcggagtgatggtcagcccattgttgcgcgagttgatcgtgcgcgccgccggcctgccgttgttgtacgacgagcgcggccgggaggggcggttgatggcggtgctgctggatgaactggagtggtcgcgggaacagcccctggccttgccagaccccgcggaccgacgcctgggaagaatctgccaggcgctgctggaggatcccgctgaccctcgcgggctggaggagtgggcgcgctgcgcgggggcgtcctcgcggaccctggcacggctgtttctctccgaactgggagtgaccttcgtccattggcgccaccaggtgcgcctggccgccgccctgccacgcctggcggctggcgaagcggtggcgcggatcgccgtggatctcggctaccagacgcccagcgcattcagtgccatgttccgacgcctgaccgggagcacgccgagccgctacttcgccttgtccgattcgacgtagccttcgtccgttggcgggcggcgccgacgcggcaggattcctatgctgggcccgtttccagacgactgccccgggaggcaagcatgcaacgactgaacgtggaattccgctccgagggtgtcgccctgcgcggctggctgtatttgccggaggcgcgtgccgagcggccggcgatcgtcatgacgcacggtttttccggggtgaaggagcagtacctggaccgttacgccgaggtattcgtcgccgccggcttcgtcgtgctcctctacgatcatccgaacttcggcgacagcgacggcgagccgcgccaggaaatcgatccggtgatgcagcgtcgcggctatcgcgacgcgatcacctggttgggtgcccaggcccgggtcgacgcgaggcgtatcggcatctggggaaccagctacagcggcggacatgtgctggaagtggccgcactggatcggcgggtgaaatgcgtggtggcgcaggtgccgaccgtcagcggccatgcctcggcgttgcgccggacccgcgccgagcagttgccggcattgctggcaagcttcgacgcggaccgccagcggcgcttcgagggcttgccaccggcgctgttgccagcggtcgccgcgggccccgacgagccttgcgcgatggccggcgcggacgcccaccggttcttcaccgacagcgcggcgctggcgccgagctggtgcaaccgggtgaccctgcgtagcgccgagctggcgcgagagaacgagccgggcattcacattgggcggatcagccccacgccgctgctgatgatcgtcgccgaccgggacctgcttacgcccacggacctttgcctggaggcctaccagcgggcgttgccgcccaagcggctgctgatgctcgccggcggccatttcacgccgtacatcgagcatttcgacgccaccagccaggctgcggcagactggttcgtctgtcatctcggagagggcggcgagcagccagcgacagtcgtcgaataaatcggcaagcgctgaacgagcgttcgcctcgacggtctatcgggctcttggttcggcctgcgcagtgacaggcccgccgaatcgcaggataatgccggctattttctccgcgccatgccgccatggccggaaacgcgtgatgacggggccgacgggccccgtcagagcctggcaacccaggagtgtccggattgatcgttttccgttatttgtcccgtgaagtgctggtcaccatgagcgccgtcagcgccgtgctgctggtgatcatcatgagtggccgtttcatcaagtacctggcgcaagcggcgcaggggttgctcgaccccggttcgctgttcctgatcatggcgttccggattcccggcttcctgcagctgatcctgccgcttggcctgttcctcggcatcctgctggcctacgggcgactctatctggaaagcgagatgaccgtgctctcggcgaccggcatgagccagaagcgcctgctcggctataccatggcgccggcgctgctggtggcgatcctggtggcctggctgagcctgttcctggcgccccagggcatcaaccagttcgccctgctgttgaacaagcaggataccctgaccgagttcgacaccctggtcccgggccgtttccaggcaatgcgcgacggtacccgggtgacctataccgaggaactgtcgaaggatcgcggcgaactggccggcatcttcatttcgcagaaggacctcaacagcagcaaccaggaacgcggcatctccatcctggtggcggagaagggcacccagaacatccaggcggatggcagccgttacctgatcctgcacaacggctaccgctacgacggcaatcccgggcaggccaactaccgggcgatccagtacgacacctatggcgtgatgctgcccaagcccgaggccagcagcgaggtgagcgagcgtgacgcggtgcccaccgccgacctgttcggcagcgacaacccacgctaccaggccgaattgcagtggcgcctgtcgacaccgctgctggtattcgtggtgaccctgctggcggtgccgctgtcgcgggtcaacccacgccaggggcgcttcctcaagctgctgccggcgatcctcctttatatgggctacctggccctgctgatcgctgtccgtggccagctggacaaaggcaagatccccatggccatcggcctgtggtgggtccacggactattcctggcgatcggtcttcttctgttctactgggaacccttgcgcctgaagctggcgtcctcccgtgccggtcgcgaggtggcgcatggttaagctcgatcgttacatcggtgtcaccgtcttcgtcgcgatcctcgcggtgctcggggtgatcctcggcctggcgctgctgttcgccttcatcgacgaactcaacgacatcagcgccagctacggcatcggcgacgccctgcgcttcatcttcctcaccgcgccacggcgcgcctacgacatgctgccgatggcggcgctgatcggctgcctggtcggcctcggcaccctggccagcaacagcgaactgaccatcatgcgcgcggccggggtatccctgtcgcggatcgtctgggcggtgatgaaaccgatgctggtgctgatgctggccggcatcctggttggcgagtacgtcgcgccctggaccgagaacatcgcccagagcggccgcgccctggcccagggcggcggcgattcgcaaagctccaagcgcggtctgtggcatcgccaggggcgcgagtacatccacatcaacgcggtgcagcccaatggcgtgctgtacggcgtgacccgctaccgcttcgacgagcagcgtggcctggaatcggccagtttcgccaagcgcgcgcgcttcgagaccgatcactggcaactggaagaggtcaccaccaccttgctgcatccgagggaaaagcgttccgaggtgatcaagctaccgaccgaacgctgggatgcccagctcagcccgcaactgctgaacactgtggtgatggagcccgaggcgctgtctatcagcggtctctggcagtacatccactatctcgccgaccagggcctgaacaacaaccgctactggctggcgttctggaccaaggtcctgcaaccgctggtgaccgccgcgctggtgctgatggcgatttccttcatcttcggtccgttgcgctcggtgaccctgggccagcggatcttcaccggcgtgctggtgggcttcgtcttccgcatcgcccaggacctgctcggaccctccagcctggtgttcgacttcccgccgctgctggcggtggtgatccccgcctcgatctgcgcactggcgggtgtctggctgctacgccgggcgggctgacaggcccggcaggccgggtatgaaaaaaggccacccacgggtggcctttgtgcttccttgtcgcgtcgggctggagcctggccgccggcgcgacaaaggccaaaacagcgcgttctgcggacctgtttcgctcacttcttgtgagtgttcttcggcagcctgaccacctggctctccgaatagcggtcgtgccaggtacgcttgtccttgtcccagagcatccagaggaagccgaggccgaggcacagccaggaggcgatggcgatcatgaagcgcagcagcgcctggagcaggctgatggcgctgccgtcgcggttctgcacgcgcagtccccagacctgcatgcccagggtctggccgttgtgggtccagaatttggcgaagaagccgaacagggtgaacaccagcaaggtcgagagcagcgggtcgccgatcagcgcgccgcggtcggccagttcgcgcagatggtcgctgccgtagatcagtcgaaggatgccttgctggtagaccagggtgaccaccatcatcagcgccacgcagagcaggaagtcatagaacatcgccgccaggcggcggatcagaccggcaggggcatagacgccctggggagaaagcatgtgtttcggcatcggcgtgttccgtgcggggcaaagccggggattatacgtccatccgcagcttgcgccgcccacccgggcaacgcttttccccggctgttctagtctttgcgcagaccccaatcattacgagtcttttctatgccgattccggtgaagcgagccaggagaaaggcgctccggctgtcgttgtccgtgctggtcggggtgatgccgatcgtcctggggctgctcatcctctactggcaggccgagcgaagcctccaggagacgtccgagcaggcagccgggaatgcggtgcggcagttcgaacggatgctcgacaacgctgcgttggcggcgcgcaaggtcatgccggtggcggggcgtccttgtcccgaggccgagctggcgctgcgcgagcaagtggcgatcatgccgttcgtgcgctcggtcaatttgacgcgcgacaatacgatctattgcacgtcgttgttcggcggcttcgacgagccggtgcggatcgagaactatgtcgacggacgcctcctgctgatgcccggcaaccaggtcacgccggacgccgcgctgctggtcctgcgggacttcgacggcaagcgcggggtattggcggcgatcgacgggcgctacttgagctacgtgctggacctcgttgaccgacgcagccgccaggtgctggtggtcggtcccaattggctggatgccgagggccacactcaccgcgacgcgccgcccacctatgaggtcgccgccgtatcgctcgcttcgcagcgttatccgttgcgggtgctgtcgggcttccccgagggcgaggaatggcgatcgatccgctcgcagaacccggcgatgttcggcctgctactgttcttcggactgctggccggcactctgtgctactggctatccaggcgggtcgcctcgcccagcagcgaactgcgccgggccctggaggccaacgagttcattccctactaccagccgctgagtcccggccagggtggacgctggataggcgtcgaggtgctcatgcgctggcgtcatccgcgcgagggactgatccggcccgacctgttcatacctttcgccgagcgctcgggactgatcgtaccgatgacgcgcgcgctgatgcgccaggtcgcggaagacctcggcgggcatgccgggaagctggagccgggcttccacatcggtttcaacatcagcgccacccattgccacgatctggccttggtggacgactgtcgcgagctgttggcggcgtttccgcccgggcacatcaccctggtcctggaactgaccgagcgcgagctgatcgagtcgagcgaagtcaccgaccgcctgttcgacgaattgcatgccctgggagtgaagatcgccatcgacgatttcggcaccggacattccagcctggcctacctgcgcaagttccaggtggactgcctgaagatcgaccagagcttcgtcgcccgcatcggcatcgataccctttccgggcatattctcgacagcatcgtcgagctgtccgccaagctcgacctggatatcgtcgccgaaggcgtggagacccccgagcagcgtgactacctggccgcccgcggggtggattacctgcagggctacctgatcggccggccgatgccgctggagagtctgctttccagcctgactgtgcaggaagggcagggggcttccgtcgtcgcactgccggcagatcgaggctagcggctaccagtccctcggcgaggggcagcctctcagcttcttcgttacggatgggacaaaaggcccgcaggtcgagcaggtgcaagccctgcatcgcctctggcacgacaaaatgcctcgcatccgcggggctatttttttgcttcggctgtggtagatttttttcgccgagctgggaagacagcagctcgggtaaaaggcagcgtctcgactccagcgctgcctttttttatttgcaggccggaccagccagatcgcggacaacaaaaaaccggcgcgaaggccggtttctctgctgtcctgggcccccctggaaacgcttgggaagtcaggatggtgcctcgggagagactcgaactctcactctgtcgccagaaacggattttgaatccgccgcgtctaccgattccgccaccgaggcaatggcggcgcagtatagggaggcgcctaccgttggtcaatcgggttcgtggcggggaaaacacatttccggtaagctacgcggcctttcgagagtctccccatgcgtgtcgccgattttcatttcgacttgcccgaggccctgatcgcccgtcatcccctgcctgaacgccgcgcaagccgcctgttggcgctggatggcccgacgggaaccctcgcccacagacaattcgccgatctcctggactacctgcgtccgggcgacctgatggtgttcaacaatacccgggtgatcccggcgcgcctgttcggccagaaggagtccggtggcaagctggaagtcctggtcgagcgcgtgctcgaccagcaccgggtgcttgcccacatacgcgccagcaaggcgcccaagcccggtacgcggatcctcgtcgaaggcggtggcagcgcggagatgctgcaacgccacgacgccctgttcgaactcgctttcgccgagcctgtgctgcctttgctggagcgggtcgggcacatgccgttgcctccctatatcgaccgaccggacgatgcggccgaccgcgagcgctaccagaccgtctacgcccagcgcgccggtgcggtggcggccccgaccgccggcctgcacttcgatgaggcgctgctcgaggcgatccgcgcgaagggggtggataccgccttcgttaccctgcatgtcggcgccggtaccttccagccggtgcgtgtcgagcgtatcgaggaccatgtgatgcaccgcgaatggctggaggtcggccaggacgtggtggacgcggtttccgcctgccgggcccgcggcggccgggtagtcgccgtcggcaccaccagcgtgcgctcgctggaaagcgcggcacgcgacggtgagctgaagccgttcagcggcgacaccgacatcttcatcttcccgggccggccgttccatgtggtcgatgccctggtcaccaacttccacctgcccgaatccaccctgctgatgctggtctcggccttcgccggctacccggagaccatggccgcctacgccgcggcggtggcgcagggctatcgcttcttcagttacggtgatgccatgttcatcacccgcaatcccgcgccccgcggacccgaggactgatccatgagcttcatgaacttcgagctgctggcgaccgacggcaaggcccgtcgcggccgcctgaccttcccccgcggcgtggtcgagaccccggccttcatgccggtgggcacctacggcacggtgaagggcatgttgccgcgcgacatcgaggacatcggcgcgcagatcatcctcggcaacaccttccatctctggttgcgcccgggcaccgaggtgatccagcgccacggcgacctgcacgacttcatgcagtggaaaggcccgatcctcaccgattccggcggtttccaggtgttcagcctgggagccatgcgcaagatcaaggaggagggcgtgaccttcgcctcgccggtggacggcgccaaggtcttcatggggccggaggagtccatggcggtgcaacgcgccctgggctcggacatcgtgatgatcttcgacgagtgcacgccgtacccggccgaccacgacgtcgccaagcgctccatggagctgtcgctgcgctgggccaagcgttcgaagatcgcccatggcgatagcccgtcggcgctgttcggcatcgtccagggcggtatgcacgaggacctgcgcctgcgctcgctggatggtctgcaggagatcggcttcgacggcctggccatcggtggtttgtcggtgggcgagccgaaggaagagatgatccgcgtgctcgatttcctgccgccgcagatgccggccgacaagccgcgctacctgatgggcgtgggcaagccggaagacctggtggaaggcgtgcgccgcggcgtggacatgttcgactgcgtgatgccgacgcgcaatgcgcgcaacggccacctgttcgtcgacagcggggtgatcaagatccgcaactcggtacacaagcacgacgactccacgctcgacccgacctgcgactgttacacctgcaaacatttttcccgcgcctatctgcaccacttggacaagtgcggggaaatgctcggtagcatgctcaataccatccacaacttgcggcattatcagcgggttatggctggtttgcgcgaggcaatccaacagggtacattggccgcctttgtcgatgccttctatgccaagcgcggccttcccacgccgccgctggatgcctgactttcctttatccaactctattgctttgtgacaggagtgctacatgagctttctaattcccgctgcctacgccgacgcagccgctccggcagccgctggcccggccggcaccggtttcgagtgggtcttcctggttggtttcctggtcatcttctacctgatgatctggcgtccccaggccaagcgcgccaaggaacacaagaacctgctgggcaacctgcaaaaaggtgacgaagtcgtcacttccggcggtatcgccggcaaggtgaccaaggtcgccgacgatttcgtcgtcgtcgaggtttccgacaacgtcgagctgaagttccagaaggccgcgattgccgcgaccctgccgaaaggcaccctgaaagcgatctgattttcacctaaacacatgacggggcgcgcaaggcgccccgcgtcataacgggcggtgtcatgctcaacaagtatcctctgtggaaatatctgctgatcctggcggtcctcgccgtcgggttcatctattccgcacccaacctctacccggacgacccggcggtgcagatcagcggcgccagcacggcgctgcaggtcacccaggccgacgtcgaccgcgctgccaaggcgctgaccgacgccggtatcgcggtgaaggccgacagcctgtcgaagaagggcggcctgatccgcctggtcaagcaggacgaccagcttcccgccaaggaagtggtgcgccggaccctgggcgacgactacgtggtggcgctgaacctggcccagaccactcccgagtggctgcgcaagctgggcggcagcccgatgaagctcggcctggatctgtccggcggtgtgcacttcctgctggaagtggacatggacaaggcggtcgatgcccgcctgaaggtctatgaaagcgaagtgaagagcctgctgcgcaaggagcgcgtgcgctaccgcagcctgccgatccaggatcgcgcgatccagctcggtttcaccgacagcgaatccctggacaaggcgcgcagcctgatcgccaaggacttccgcgatttcgaggtcgtgcccgaagagcgcaacggcctgcaggtcctgcgcgtcgccctgacccaggccaaactggcggaaatccgcgaatactccatcaagcagaacctcaccaccgtccgcaaccgggtcaacgagctgggcgtatccgagccgctggtgcagcgccagggcgccaatcgcatcgtggtcgagctgccgggcgtgcaggacaccgcggaagccaagcggatcctcggcaagaccgccaacctagaattccgcctggccgccgagccggacgccctgaagtccgccaccgagaccttcgagttccgcgagccgcgccggccgccggtgccgctggagcgcggggtgatcatcaccggcgaccaggtcaccgacgccagcgccagtttcgacgagaacggccgcccgcaggtgaacatccgtctggatggccatggcggcgagctgatgaaccgcgccacccgcaacaacgtcggccgcagcatggcggtggtgtttatcgagcagaagccggtgacccgctacaccaagcagatggtcgatggcgtcgagaaggaggtcgcggttccggcgttcaaggaagagaagcagatcatcagcctggcgaccatccagtcgccgctgggcaaccagttccgtatcaccggcctcgatggccccggcgagtcctccgagctggccctgctgctgcgtgccggcggcctggctgcgccgatgtacttcgccgaagaacgcaccatcggcccgagcctgggggcggacaacatcgccaagggtatcgatgcgtcgctctggggcatgctcttcgtatcgctgttcatcatcgtcatctaccgtttcttcggcgtgatcgccaccgttgcgctggccttcaacatggtcatgctggtggcgctgatgtcgatcctcggcgcgaccctgaccctgccgggcatcgccggtatcgtgctgaccatgggcatggcggtggacgccaacgtgctgatcttctcgcggatacgcgaggaactggccaatggcatgtcggtccagagggcgatccacgaaggcttcaaccgtgccttcaccgcgatcctcgacgccaacctgacctcgctgctggtcggcggcatcctctacgccatgggcaccggcccggtgaaaggatttgccgtgaccatgtcgctcggcatcatcacctcgatgttcacggccatcatggtcacccgcgcaatggtcaacctgatcttcggcgggcgtgacttcaagaagctgtggatctaaggggactgagatgaatatcaagatcggtaccatcaacttcatgggcatccgcaacgtcgcgtttgccgtcaccctgatcctgaccgtcatcgccctgggcagctggttcaccaagggcatcaacttcggcctcgacttcaccggcggtacgctgatcgagctgacctacgaacaaccggccgatctcggcaaggtgcgtggtcaactggtcggcgccggctacgaggacgccgtggtgcagagcttcggcgacgcccgcgacgtgctggtgcggatgcccagcgaggacccggaactgggcaagaaggtcgctaccgccttgcagcaggccgatgccggcaacccggcgaacctgaagcgggtcgagtacgtcggcccgcaggtgggtgaagaactgcgcgaccagggcggcctcggcatgctcctggcgctgggcggcatcctgctgtacgtcggcttccgcttccagtggaagttcgccctcggtgcgatcctctcgctggtgcacgatgcgatcatcgtgatgggcgtgctgtcgttcttccaggtgaccttcgacctgaccgtcctcgccgctgtgctggcggtggtcggttactcgctgaacgacaccatcgtgatcttcgaccgggtgcgcgagaacttccgcgtgctgcgcaaggccgatctggtcgagaacctgaacatctccaccagccagaccctgttgcgtaccatcgccacctcggtttccacgctgctggctatcgccgcgctgctgttcttcggcggcgacaatctgttcggtttctccatcgccctgttcgtcggtgtaatggcgggtacctactcgtcgatctacatcgccaacgtggtattgatctggctgaacctgaccagcgaggacctgatcccgccgcaggccaaggacaccgtcgacgatcgcccctgaggcgctctggttcggcactccggcgcctgccggtcactcgaggactcccgcttttggcgggagttttcgtatctgcgccaacgaaacgtttgtcgggagcctggaacttggtggtttttgcccagtcctaggcaaggcaaagggcgaacatagcccgcattggatgaaagccaggaggtacatgtgaacaagtcgatgctcgtcggggccgttctgggtgccgtaggcgtgaccgcaggtggcgcggtagccacctatagcctggtggatcgcggtcccgactacgccgaggtcgtcgctgtccagccggtcaaggaaaccatcaagacgccgcgccaggtctgcaaggacgtggccgtgacacgccagcgtccggtcaaggaccagcaccagatcgccggtaccgccatcggtgcggtggtcggcggcttgctgggcaaccagatcggcggcggtaccggcaagaagatcgccaccgtggccggcgccgtcggcggcggctacgccggcaacaaggtgcaggaaggcatgcaggagcgtgacacctacaccaccaccgaaacccgctgcagcaccgtgcacgacagcagcgagaaggtcgtcggctatgacgtgaagtacatgctcgacggcaaggccgggcagatccgcatggagcgcgatccgggcagccagatcccggtcgacaagaatggccggctgatcctcagccagggcgaaacgctgcgctgagcctgactgtcgcaatgatgcacaagggcgcccgcgggcgcccttgtgcattttcatggagatgaaaaacccggcgccaggccgggttcttcgtcagcggcggatcagcgcttcagcgacggcggcaggtgcggctggatggtggtcagcagtgccttgaagcatttggtgttgccggcgacgatgtgacccttctcgaggaattcgtggctgccggtgaagtcgctcaccaggccgccggcttcctgtaccagcagggcgcctgccgccatgtcccattcggacaggccgaattcccagaaggcgtcgtagcgtccggcggcgacgtaggccaggtccaggctggcggcgccggcgcggcggatgccggcggtctggccgaccaggctgcggaacatgttcaggtagttgtcgagattgtcgatctggttgtcgcggaacgggaacccggtgccgagcagggcgccttccaggctcttgcggccgctgacgcgcaggcggcgaccgttgagggcggcgccgcgaccgcggctggcggtgaattcttcctggcgtaccgggtcgaggaccacggcgtgctccaggcggcccttgtacttgcaggcgatgctcacggcgaagtgcggtacgccatggatgaagttggtggtgccgtccagcggatcgatcacccagaggtaatcggcgccctcgccgctgccttcgatgaagccgccttcctcgcccatgatcgcgtgagtcggataggccttgcgcagcgcggcgacgatggtctgctcggcggcgcgatcgacttcggtgacgtagtccttggcatccttctcgttgaccgagatgacatccaggcgttcgatggagcggaaaatcagttcaccggcgctgcgagcggcgcgcagggcgatattcagcataggctgcatggagaggtcacctgggtcgttaaagaaagccggccattctagcagaaaccgatggcgtttgaagggcgacctgtcggccgcatggtataaagctgacctctgctgtaggatttcacacccttcagtaacttggcgttggagagcatcggcgttgctcgaccgtattcgtgtggtgttggtcaacaccagtcatcccggcaacatcggcggggcggcccgtgccatgaagaacatgggcctgtcgcaactggtgctggtgcagccggaaagctttccccacggcgacgcggtggcgcgggcttccggcgccaccgacatcctcgacgccgcaagggtggtggacaccctggaagaggccctgagcggctgcagcgtggtgctcggcaccagcgcccgcgaccggcggattccctggccgctgctggatccgcgcgagtgcgcgacgacctgcctggagcacctggaggcgaatggtgaggtggccctggtattcgggcgcgaatatgcgggtttgaccaacgaagaattgcagcgctgccagttccatgtgcatatcccctccgatcccgagttcggctcgctgaacctggcggccgcggtccaggtgctcacctacgaggtgcgcatggcgtggctggcggcccagggcaagccgaccaagatggaaaagttcgagtccacctcgatgctcaacaccgagctggtgacggccgacgagctggaactctattacgcgcatctggagaggacgctgatcgatatcggcttcctcgatccggagaagccgcgccacctgatgtcgcggttgcggcgcctgtatgggcgcagcgcgatcagcaagctggaaatgaatatcctgcgcgggatcctgaccgaaacccagaaggtggcccgaggcctgtcctacaagcggagtgacgactgatgttcgaacgtgtgcgtgaagatatccaaagcgtattccaccgtgatccggcggctcgcaacgcactcgaggtcctcacctgttatccgggcctgcacgccgtctggctgcatcggctggcccacggcttgtggacgtccggctggaagtggctggcgcgcctggtgtccaatttcggccgctggatgaccggcatcgagatccacccgggggccaggatcggccggcgcttcttcatcgaccacggcatgggcatcgtcatcggcgaaaccgccgagatcggcgacgacgtcaccctctatcagggcgttaccctgggcggcaccacctggaacaagggcaagcgccaccccaccctcggcaacaacgtagtggtcggtgccggtgccaaggtgctcggcccgttcaccgtcggcgagggcgccaaggtcggctccaacgccgtggtgaccaaggaagtcccgccgggtgccaccgtggtcggcattcccgggcggatcatcatgcgcgaggactccgagcagcaggccaagcgccaggcgatggcggagaagctcggcttcgatgcctatggggtcagccaggacatgccggacccggtggcgcgtgccattggtcagttgctcgatcacctgcaggccgtcgacggccggctcgagggcatgtgccaggcgctcaccgccctgggtagcgactactgcgcgaaggacctgccggtattgcgcgaggaagatttcgccggagtcaaggacgaggacggcaatccggccgcgtaatgcgcggccggcggctttctgctagcatgtagcgccctgaatttgcctaatcctgagtaatttgatcggtcttatagttgacctaattactcggataagagcataatccgcgtcaaccccgaatgatcccgatgggaaaagcccatgcgtctgaccaccaaaggccgctacgccgtaaccgccatgctcgacctggcgctgcatgctcagcaaggtccggtctcgctggccgatatctccgaacgccaaggcatttccctgtcctatctcgaacagctgttcgccaagttgcgccgtggcaacctggtgaccagcgtgcgcggcccgggcggcggctaccagctgtcccgccatatgtcgggcatccatgtggcgcaggtgatcgacgcggtcaacgaatccgtcgatgcgacccgctgccaggggcagggcgattgccactccggcgatacctgtctgacccaccacctgtggtgcgacctcagtttgcagatccatgagttcctcagcggcatcagcctggccgatctggtcagccgccaggaggtccaggaggtcgcgctgcgccaggacgaacgccgttgctcaggcaagacgcctcgtctcgacaagattgaagcgtccgccatcgactgagcagggcgccagcctgtaggagttacctgatgaaattgccgatctacctcgattactccgcgaccactcccgtcgatccccgcgtcgcccagaaaatgagcgaatgcctgctgatggacggcaacttcggcaacccggcttcgcgttcccacgtgttcggctggaaagccgaagaagccgtggagaacgcccgtcgccaggtggccgaactggtcaacgccgatccccgcgagatcgtctggacctccggcgccaccgagtccgacaacctggcgatcaagggcgtcgcgcacttctactcgggcaagggcaagcacatcatcacctcgaagatcgagcacaaggcggtcctcgacacctgccgccagctggagcgcgaaggtttcgaagtgacctacctggagccgggcgaagatggcctgatcactccggctctggtcgaggcggcgctgcgtgacgacaccatcctggtctcggtcatgcacgtgaacaacgagatcggcaccgtcaacgacatcgccgccatcggcgagctgacccgctcccgcggcgtgctgttccacgtcgacgccgcacagtcgaccggcaaggtcgagatcgacctggacaagctcaaggtcgacctgatgtccttctccgcgcacaagacctacggcccgaaaggcattggcgcgctctacgtccggcgcaagccgcgcgtccgcatcgagggtcagatgcacggtggcggccatgagcgcggcatgcgttccggcaccctggccacccaccagatcgtcggcatgggcgaggcgttccgcatcgccaaggaagaaatggcccaggagaacgcccgcgtgctggcgctccgcgaccgcttcttcgcgcagatcgacggcctggaagagctctacatcaacggcagcatgacctcccgcgtcccgcacaacctcaacgtcagcttcaactacgtcgagggcgagtcgctgatcatggcgctcaaggacctcgcggtctcctccggttcggcctgtacctcggcgtccctggaaccgtcctacgtattgcgcgccctgggccgcaacgacgaactggcgcatagctccatccgcttcaccttcggtcgcttcaccaccgaggaagagatcgactatgccgcgaagaaggtggtcgaggccgtttccaagctgcgcgaactgtcgccgctgtgggatatgtacaaagagggcgtcgacctgtcccaggtcgaatggcaggcgcactgagcgcctcgtgccccggaaaaacgtgaggattagccatggcatatagcgaaaaggtcatcgaccactacgaaaacccgcgcaacgtcggcaagctcgacgctgccgatcccaacgtcggcaccggcatggtcggcgcgccggcctgcggcgacgtgatgcgcctgcagatcaaggtcaacgagcagggcgtgatcgaagacgccaagttcaagacctacggttgcggttccgcgatcgcctccagctccctcgccaccgagtggatgaagggcaagaccctggacgaggcggaaaccatcaagaacaccaccatcgccgaagagctggccctgccgccggtgaagatccactgctccgttctcgccgaagacgccatcaaggccgccgttcgcgactacaagcagaagaagggtttgctctaagccgctcgtgacgagtaaggagttgcaatggccatcagcatgaccgaagccgccgccaaacacgtgcagcgctccctcgaggggcgcggcaagggcgagggtatccgtcttggcgtgcgcaccactggctgttccgggcttgcctatgtcctcgaattcgtcgatgaactggcggccgaggacctggtcttcgagagccatggcgtgaaggtcatcatcgacccgaaaagcctggtctatctcgatggcaccgagctggacttcactcgcgaagggctcaacgaaggcttcaagttcaacaatcccaacgttcgtggcgaatgcggctgcggcgaaagcttcaacgtctgaggccggcgtgggtaaaccctgtcatttcgcccagttcgacctgcaaccggctttcctggtcgatctcgacgagctcggccagcgctatcgcgagttggtgcgcagcgtccatcccgaccgtttcgccgacgctcccgagcgcgagcagcgtctcgccctggaacgcgcggcgcaactgaacgaggcctaccagaccctgaagagcgctccgcgccgggccctgtacctgttgaccctgagtggtcacgagttgcccttggaggctacggtgcaggatccggagtttctcctgcagcagatgcagctgcgcgaggaactggaggagttgcaggacagcgccgacctggccggcgtggcgaccttcaagcgtcggctcaaggccgcccaggccgagctggagcgtgagttcgccgcgtgctgggacgatgcgcagcgccgcgaagaggccgaacgcctggtccgtcgcatgcagttcctcgacaagctcgcgcaggaagtgcgccagctggaagagcgactcgacgattaatccctgcggcccccgggccgcaccccatagttaagacagagcatggccctactgcagatcgccgagcccggtcagagtcccaagccccatgagcgtcgcctggcggttgggatcgacctgggtaccaccaattcgctggtcgccgcggtgcgtagcggcgtcgccgagcccttgccggatgcgcagggacgcctgatcctgccttccgcggtgcgttatcacgccgagcgggcggaagtgggcgagagcgcccgcgcggccgccgcggaggatcccttcaataccgtcatttcggtcaagcgcctgatggggcgtggcctggaggacgtcaagcaactgggcgagcaattgccctaccgcttccgccagggcgagtcgcacatgcccttcatcgagaccgtacaggggttgaagagtcctgtggaagtctcggcggacatcctgcgtgagctgcgccagcgcgccgaaaccaccctcggtggcgagctggtgggtgcggtgatcactgtgccggcctatttcgacgacgcccagcgccaggctaccaaggatgccgcgcgcctggccggactgaacgtcctgcgcctgctcaacgagccgaccgccgccgccgtggcctacggcctggacaagggcgcggaaggcctggtggccatctatgacctgggtggcggaaccttcgacatttccatcctgcgcctgacccgcggtgtcttcgaagtcctggccaccggcggcgatacggccctgggcggcgacgacttcgaccatgccatcgctggctgggtgatcgagcaggctggcctttctgccgatctggacccgggcagccagcggcagttgctgcaaatcgcctgtgcggccaaggagcgtcttaccgacgaggcgtcggtccgggtcgcctacggcgactggagcggcgagctgagccgggcgacgctcgacgagttgatcgagccgttcgtcgctcgcagcctgaagtcctgccgccgagcggtgcgcgactccggtgtcgatctggaagaaatccgctcggtggtgatggtcggtggctcgacccgcgtgccccgtgtgcgcacggcggttggcgagttgttcggctgcgagccgctgaccgatatcgatccggaccaggtggtcgccatcggcgcggccatccaggccgatgccctggccggcaacaagcgcggcgaggaattgctgctgctggacgtcattccgctgtcgctcggcctggaaaccatgggcgggctgatggagaaggtgattccgcgcaataccaccatcccggtggcgcgcgcccaggagttcaccacctacaaggacggccagacggccatgatgatccacgtgctgcagggcgagcgcgagctggtgaaggattgtcgttcgctggcgcgcttcgagctgcgcggcattccgccgatggtggcgggcgcggcgaaaatccgggtgaccttccaggtcgacgccgacggcttgctcggcgtgtccgcacgcgaactgagttccggcgtcgaggccagcatccaggtcaagccgtcctatgggctgaccgacggcgagatcgcgcggatgctcaaggactccttcgactacgccggcgacgacaaggctgcccgcgccctgcgcgaacagcaggtcgaggcgcagcggctgctggaggccgtgcagtcggcgctggacgtcgacggcgagcggctcctggacgaagaggagcgcctggccatcgcggcgcagatggacactttgcgtgaactggccggtggtagcgacaccgcggccatcgagaaccagatcaagcgcctgtcccaggtgaccgacgctttcgccgcacggcggatggacgcgaccgtcaaggccgcgctctccggccgccggctcaacgaaatcgaggaataagcgaagatgccgcagatcgtgattctgccccatgccgatcactgccccgagggggcggtattcgaggcgaagcccggcgaaaccatcctggatgccgcgttgcgcaatggcatcgagatcgagcatgcctgtgagaaatcctgcgcctgcacgacctgccacgtaatcgtccgcgaaggcctcgactccatggagccgtccgacgaactcgaagacgacatgctggacaaggcctggggcctggagcccgattcgcggctatcctgccaggcagtggtggccgacgaagacctggtggtcgagattcccaagtacaccatcaaccaggtgtcggaaggccactgagcccggcggtagtagaggagcgtgcaatgagcctgaaatggaccgatgtgctggaaatcgccatccagctcgacgaaagcaagccggaggtcgatccgcgatacgtcaacttcgtcgatctgcggcgctgggtggtggaacttccagagttctccgacgatcctcagcgtagcggggagaaagtcctggaggccatccaggccgcctggatcgaggaacgggactagccataggcccgccctacgcatttgccgggaacccgcgtataattcgcgggttttattttaggtaaggcctgaaatcgcccgcgggcgcattccaggctaggcgcgccgggcccgatgccaggcgcagccacgctgattccggccctttcgggccgttttcgtcagcgtcctgaacgaatcacggcgtcccgccccgctggcggggccgcccatgctagacaaccttgtttcggagttttaccaatggcactgcaacgcaccctgtccatcatcaagccggacgccgtttccaagaacgtgatcggcgaaatcctgacccgcttcgagaaagccggcctgcgcgtcgtcgccgctaaaatggttcagctgtccgagcgtgaagccggtggcttctatgccgagcacaaagagcgtccgttcttcaaggacctggtttccttcatgacttccggtccggttgtagtccaggtcctggaaggcgaggacgccatcgccaagaaccgcgagctgatgggcgccaccgatccgaagaaagccgacgccggtaccatccgcgccgacttcgccgtctccatcgacgagaacgccgtccacggttccgattccgaagcttccgccgctcgcgagatcgcctacttcttcgcggctaccgaagtctgcgagcgcattcgctgatcgagcgtgggtgagggtgaaaccatgacaacgaccaccgccggcaaggtgaacctgctgggcctgacccagccgcagctggaacagttcttcgagtccatcggcgagaagcgtttccgggccggccaggtcatgaagtggattcaccactttggcgtcgacgatttcgacgccatgaccaacgtcggcaaggccttgcgcgaaaagctcaaggcctcagccgagatacgcggtcccgagatcgtcagccaggatatttccgccgacggcacccgcaagtgggtggtccgggtggcgtccggcagttgcgtcgagaccgtgtacatcccccagggcggacgcggcaccctgtgcgtgtcctcccaggcgggctgcgccctggattgcagtttctgctccaccggcaagcagggtttcaacagcgacctcaccgccgccgaggtgatcggccaggtgtggatcgccaacaagtcgttcggtaccgttccggccaagatcgaccgcgccatcaccaatgtcgtgatgatgggcatgggcgagccgctgctgaacttcgacaacgtggtcgccgccatgaacatcatgatggacgacctcggctacggtatttccaagcgcaaggtgaccctgtccacctccggcgtggtgccgatgatcgacaagctcggcgaggtgatcgacgtgtccctggccctgtcgctgcacgcaccgaacgacgagttgcgcaacaagctggtgccgatcaacaagaagtatccgctgggcatgctgctggatgcctgccgccggtatatttcccggctcggcgagaagcgcgtgctgaccgtcgaatacaccctgctcaaggatgtcaacgatcagcccgagcatgctgagcagatgatcgcattgctgaaagacacgccttgcaagatcaacctgattccgtttaatccattcccgcactccggctacgagcgcccgagcaacaatgccatccggcgtttccaggacatgttgcacaagggcggcttcaacgtgaccgtgcgtaccacccgcggcgacgacatcgacgcggcctgtggccaactggttggtcaggtcatggatcgtacccgccggagcgaacgttatattgccgtgcgccaactggccgagtccgagtcggcggcgaatcgaaattgagtgagaggagggttccgatgactgtacgcgccgcgctggtgttcctgttggcagttgggctgacaggctgcgtgacgagcggagatcagaatcccctgaaaaccgacaagggccgtgacgaggcgcgcgacgcctatatccagcttggcctcggctatctccagcgggggaacaccgagcaggccaaggtgccgcttcgcaaggccctcgagatcgacccttccagcgccgacgcgcacgccgcgctggcggtggtattccagaccgagatggagcccaagctggccgacgaggagtaccgcaaggcgctcgccagcgatagccgcaatgcccgggtactgaacaactacggcggtttcctctacgagcagaagcgctacgaggaggcctaccagcgtctcctggaggccagccaggacaccctctatcccgagcgctcgcgggtcttcgagaacctcggcctggtttcgctgcaaatgaagaaaccggcccaggccaaggagtacttcgagaaatccctgcgtctgaaccgtaaccagcccagcgtcgcgctggagatggccgacctgctctacaaggagcgcgagtacgtgccggctcgccagtactatgatctctttgcccagggcggcgggcagaacgcccgcagtctgttgctgggcattcgtctcgcgaaggtcttcgaagaccgcgacacggccgccagctatggcctgcagttgaaacgcctgtacccaggctctcccgaatatcaggaattccaggcggaaaaatgatgaaagcgccgcagcccgaagtcgtagccaccgcttcccgtcagaaccccggggaaaccctgcgccaggcgcgcgagcagaagggcctgtcgctgtcgcaggtggccgggcaactgaacctgaccgagaattcgctgcgtcagctggaaaacggcgcgttcgacaagctgccgggacacaccttctcgcgcggttacatccgcgcctacgccaagctcatgggcctcgaccaggccgagctggtcaacagcttcgaccatttcaccggcaccaatgccagcggcagcaccgtacagagcctgggacgggtcgccgagccggtgcgcctgtcgcgcaacgtgctgcgtatcgtcagcctgttgctgctcgccctgctgatcggcttcggctacttctggtggcaggagcattccgcgcgcacgccggaaaccgccggtctgagccttgagcatgtcgaagtggaaagcgccgacggcaccaccgagatccataccctggacgagcctgaagaccaggcggtgatcgaagcgcagaaggaaggcgagcaagcgcccgccgaggtttctccggaagtcgctgcccaggccgagggagcgccgccggtggcgagcgagggcgcgcaggttcccgccgctccggcccagggcacccccgccgcaccccagcagcccgttaccgccgcgcctgccggcacggctcccgctcccggtactgctccagccgttccagcgacggccagtccggccgccccgccagcgccgagcgaacctgccgccgcgcccgtggtggccggcgagggccagggggtggtcaaggtacagttcgtcgccgattgctggacccaggtcaccgacgccaacggcaaggtcctggtcagcgcgctgaagcgcaagggcgacagcctggaactggccggcaaggccccgctggagctgcgcctcggtttcgctcgcggcgcccaggtcagctacaacggccagccggtggacgtgacccccttcgtccgcggcgaaacggcccgtctgaaggtaggacaatgagcattcatagcgcttctccgatcattcgccgcaagtctcggaaaatctgggtcggcaacgtcccggtgggcggcgatgcgccgatcgccgtgcagagcatgaccaacaccgagacctgcgacgtcgctgccaccgtcgcgcagatccgccgcctggaagatgccggcgcggacatcgtgcgggtttccgtccccgacatggacgccgccgaggcattcggcaagatcaagcagcaggtcaacgtgccgctggtcgccgacatccacttcgactatcgcatcgccctgcgcgtcgccgagctgggagtggactgcctgcgcatcaatccgggcaacatcggtcgcgaggaccgggtcaaggccgtggtcgatgccgcgcgcgagcgcaacatcccgatccgtatcggcgtcaatgccggttcgctggaaaaggacctgcagaagaaatacggcgaaccgaccccggaagccctgctcgaatcggccatgcgccacgtcgatcatctcgacaagctggacttccagaacttcaaggtcagcgtcaaggcctccgacgtcttcatggccgtcgccgcctatcgcctgctggccaggcagatcgagcagcccctgcacctgggcatcaccgaggccggcggcctgcgctccggcacggtgaagtcggcggtggggctgggcatgctcctggccgagggaatcggcgacaccatccggatttccctggctgccgatccggtcgaggagatcaaggtcggtttcgacatcctcaagtccctgcacctgcgctcccgtggcatcaacttcatcgcctgcccgagctgttcgcggcagaacttcgacgtggtgaagaccatgaacgagctggaagggcgcctggaggacctgctggtaccgatggacgtggccgtgatcggttgcgtcgtcaacggtccgggcgaagccaaggaggcccatgtcggcctcaccggcggcactccgaacctggtgtatatcgacggcaagccgtcgcagaaactgaccaacgacaacctggtggacgagctggaacggctgatccgccagaaggcggccgagaaggccgaggccgatgcgagcctgatcgcccgcggctgacccgtttaaggaccctacgtgagcaagtccctgcaagccattcgtggcatgaacgacatcctgccggagcagactccggcctggcgctatctggaacgcaccttcgccggcctgctggacggctacggctacagcgagatccgcctgcccatcctcgagttcaccgaactcttcgcccgcggcatcggcgaaggcaccgacgtggtcgacaaggagatgtacaccttcctcgaccgcaacggcgaatccctgaccatgcgtccggaaggtaccgccggttgcgtgcgcgccgtgctggagcacggcctgagcggcggtggccaggtgcagaagctctggtacaccgggccgatgttccgttacgagaaaccgcagaaaggtcgctaccggcagttccaccagatcggcgtggaagtcttcaacctgcccggtccggacatcgacgccgagttgatcatcctcacctggcgcctgtggcagaagctcggcatggccgacgcggtgaccctgcagctcaacaccctcggctccagcgaggcccgcgcacgctatcgcgaggccctggtggcctatctgcaggagcgcttcgagcaactcgacgaagacagccagcggcgcatgaccaccaatccgctgcgaatcctcgacagcaaggtggagagcacccaggcattgctggttggcgcgccgaccctgcacgactatctcgacgaagaatcgatcgcccacttcgagggtctcaaggcccgcctggatgctgtcggactgcgctacgaaatcaaccagaagctggtgcgcggcctggactattactgccgcacggctttcgaatgggtcaccgacaagcttggcgcccagggcaccgtttgcggcggtggccgctacgacgggctggtcagccagttcggcggcaagccgaccccgggtgtcggtttcgccatgggcgtggaacgcctggtgctgctgctggaaaccttgggggtgatccccgccgaactgaaccgtccggccgacctctacgtctgcgccttcggcgaaccggccgagctggccgccctgaccctcgccgaacagttgcgcagcgccattcccggcatacgcctgctggtcaacgccggcgccggtagcttcaagagccagttcaagaaggccgacaagagcggcgcgcgctttgccctgatcctcggggaggacgaggtggccaatcgcgtggtaggtttcaagcccctgcgtgacgagggcgagcaacaaagcattgcctgggatgctctgcccgagcacctggcagcctgtctggcacaggcttgagaacataaagaataggagtgattggggtgacatcgcgtaccgaagacgaagacctggcgcagatcaaggactggtggcagcgcaacggcaagcccctggtcaccggcggcatcctcgcgctggcagtggtattcggctggcaggcctggcagaagtaccagaccaaccaggcgcagggcgcctcgatcgtctaccagcaactgatcgaaaccgcgctgaatccggccggccagccggatccggcgaaggtggcggagctggccggcaagctgaagagcgagttcggcggcacccattatgcccagtacggcagcctgttcgtggccaaggtcgcggtcgacagcggcaagctggatgacgccgttgccgagctgaaggcggtcatggacaagccggccgacgccaccctcggcgaactggcgcggcagcgcctggcccgggtcctggcggcccagggcaaggtcgaggaaggcctgaagctgctcgatggcgatgccgacaaggcctacgtctcgacccgcgaggagctcaggggcgacctgctggtgcagctcaagcgcaccgacgaggcgcgcgcggcctacgagaaagccaagcagtcgctgcccgaagacggtgccggcgatgccctgcagatcaagctcgacgacctgtccaagggagaggcctgagatggtgcaatggaaacacgcggcgctgctcgccctggccctggcggtcgtgggttgcagcagcaacagcaagaaggaactcccgcccgccgaactgaccgacttcaaagaggaagtcgtgttgagcaagcagtggagccgctcggtcggtgatggccagggtgacctgtacaacctgctcgaaccggccgtcgatggttccaccatctacgccgcgtccgccgaagggcgggtgatggcgatccagcgcgagaccggcgacgtgctctggaagaaggacctcgagcgtccggtttccggcggtgtcggcgttggctacggcctggtgctggtgggtaccctgcgcggtgacgtgatcgccctcgacgaagccaccggcaagaagaagtggaccaagcgagtcaacagcgaagtgctgtcggcgccggccaccaacggcgacgtggtggtggtgcagacccaggacgacaagctgatcggcctcgatgcggccagcggcgaccagcgctggatctacgaaagcaccgtgccggtgctgaccctgcgcggcaccggcgcgccgctgatcgccggcaacatggccctggccggcctggccagcggcaaggtggtggcggtcgacgtacagcgcggcctgccgatctgggagcagcgggtagcgattccccaggggcgttccgaactggatcgcgtggtggacatcgacggcggcctcctgctgtccggcgacaccctctacgtggtcagctaccagggccgtgccgcggcgctggacgtgaacagcggccgcctgctctggcagcgcgaagcgtcgagctacgtcggcgtcgccgaaggcttcggcaatatctacgtcagccaggccagcggttcggtggaaggcctggactcgcgcggtgcctcttcgctgtggaacaacgacgccctggcgcgtcgccaactgtcggctccggcggtgttctccagcaacgtggtggtcggcgacctggaaggctacgtgcatctgctgagccaggtggacggtcgcttcgtcggtcgcgagcgggtcgacagcgatggcgtgcgggttcgtccgctggtggtcgggagctggatgtacgtgttcggcaacggtggcaagctcgtcgcctacaccatccgctagactgggtttcaagtgtccggccgctgccgtccgacgtcagcggcctttgtgttttctgaattctcgtggagagccgcatggttcccgttattgccctggtgggtcgcccgaacgtcggcaagtccactctgttcaaccgcctgaccaagtcgcgcgacgccatcgtggcggagtacgcaggcctgactcgcgatcgccagtacggcgaggcgcgctggcagggccgcacctatatcgtcatcgataccggaggcatctccggcgatgaggaaggcattgatgcgaaaatggccgagcaatcgttgcaggccatcgaggaggcggatgccgtcctgttcctggtggattcgcgcgccggcatgaccgccgccgaccagatgatcgccgagcacctgcgcaagcggaacaagcgcagcttcctgatcgccaacaaggtcgacaccatcgatcccgatctcgctcgcgccgagttcagcccgctgggcctgggcgatgcgctgccgatcgccgccgcccacggtcgcggcatcaaccatatgctgcaggaagccctggggatcttccccaaggacaacgcggaggaagagggcgagggcgagccggcgagcgaagaggtcgccgaaggcgaggaaccgacccggattcccggtcccagcgagaaggacgggatcaagattgccatcatcggccggcccaacgtgggcaagtcgaccctggtcaaccgcatgctcggcgaagagcgggtgatcgtctacgaccaggccggcaccacccgcgacagcatctacatcccgttcgagcgcaacgaggagaagtacaccctgatcgacaccgctggcgtgcggcgtcgcggcaagatcttcgaggcggtggaaaagttctcggtggtgaagaccctccaggcgatccaggacgccaacgtggtgatcttcgtcatggacgcccgcgaaggggtggtcgagcacgacctcaacctgctcggcttcgtcctcgagaccggccgtgccctggtcattgccctgaacaagtgggatggcatggaggcggccgagcgtgactacgtgaagaccgaactggagcggcgcctgctgttcgtcgacttcgccgacatccatttcatttcggccctgcatggcaccggcgtcggccatctctacaagtcggtccaggagtccttccgttcggcggtgacccgctggccgaccagccgcctgaccagcatcctcgaggacgccgtgcaggtgcaccagccgccgatggtcaacggtcgccggatcaagctgcgctacgcccacctgggcggcgccaatccgccgctgatcgtgatccacggcaaccaggtggacgcggtgccgaaggcctatacccgctacctggagaagacctaccggcgggtattgaagctggtcggtacgccgatccgcatcgagtacaagggcggcgagaacccctacgagggcaagaagaactcgctcaccgcgcgccaggtcaacaagaagcgccggctgatgtcgcaccacaagaaagccgagaagaagaagaaggacaagcgccgctgagggtggcgtttccttcgtcgaaaggcccggcgggtatccctgtcgggcctttttcattggccgcggctgtagagccaggccgccggcgttgaccgccgattccctgtcgtggcgacgaatgatcgcgaggcggttgttcgtcctgcgccatcgcctggcgcatattcccctctgacctgaagcggccacggttttttctaaggcgtgcccctgcagcgtcgctcccggatcggctatcctgccctgccacccgtctggccgggctgtcgtccggcgagtctctgcaggaagtcccgatgattcagagcaagctgccgaatgtcggcaccaccatcttcacccgcatgtcgcaactggccgccgagtgtggcgcgatcaacctctcccagggctttcccgatttcgacggcccgccggagttgcgcgaggcggtaggtaggcatatcgccgccgggcacaaccagtacgcgccgatgaccggcttgccggccctgcgcgagcaggtggcgaagaagatcgagcagttctatggacgccgggtgagcgccgacagcgaggtgaccatcacgccgggggcgaccgaggcgatcttcagcgcgatccaggcgctggtccatccgggcgacgaagtggtggtgctcgacccgtcctacgacagctacgaaccctccgtgcaactcgccggcgggcgttgcgtgcacgtgccgctggcgctgccggacttctccatcgactggcagcgcatggccgaggccatcgggccgcgtacccggctggtcatcatcaataccccgcacaaccccagcggcgcgctgatcagccgcgaggaactggaccgcctggccgcgctgatccgcgaccgggatatctatctgatcagcgacgaggtctacgagcacctggtgttcgacggtgtcgcccataccagcgtgctgtcccacgacgagttgtatccgcgttccttcgtggtcagttcgttcggcaagacctaccacgtcaccggctggaagaccggctacgtggtcgcgccgccggcgctcagcgcggagctgcgcaaggttcaccagtacgtcaacttctgtggcgtcacgccgctgcaatgggcattggcggactacatggccggccatccggagcacttgcggcaattgcccggcttctaccaggccaagcgcgacctgttctgcgacctgctgctggactctcgcttccgttttacccgtgcgccgggcacctacttccagtgcgtggactattcggccatccgtccggacctggacgacgtggccatggccgagtggctgacccgcgaacacggagtggcggcgatcccggtttcggtgttttatgaaaaggctccggacgccatgcggctggtccggttctgttacgccaaacgcgaggagacgctgcgtcaggcagcggaaaagctatgcgcgatctgacggttctgccggacctggacatcgccctggtccaatcctccctggtctggcacgacgcccaggccaaccgcgagcatttcgccgccctgctggagagtgccgccggcgccgacctggtggtcctcccggagatgttcaccacgggtttcagcatggcttcggccgagcaggccgagcccgaactggggccgacccatgcctggctgctggagcaggcccggcgccttggcgcggtggtcaccggcagcctgatcgtccagctcgccgacggcagccatcgcaaccgcctgctctgggcgcgtccggacggcgagatgctgcactacgacaagcgccatctgttccgcatggccggcgaacacgagcactacagtcccggcgaacgccaggaactgttcgaactcaagggctggcgggtgcgcccgctgatctgctacgacctgcgtttcccggtgtggagccgcgacccgcacgacaccgacctgttgctctacaccgccaactggcccgcgcctcgtcgacagcactggaaccgcctgctgccggcgcgggcgatcgagaacctttgctacgtggtggcggtgaaccgtatcggcgaagacggcaacgccttgcgctacgctggggatagccaggtcctggacttccagggcgacagcctgttcaacgcggcggacgccgacggcgtgttccgcgtccggctggacgcggcggcactggcggcctatcgccagcgtttcccggcctacatggacgcggatcgcttcgaaatccatccttgagtgccggaacgtccgcttccggtcgatgtccgaggccatgacccggcgctgcgcatgatggcgcagtgccgggaatggagttacccgtatcccgcggcgccgcgccgtgggcatcagatcaggaggaagaccaatgggactgctcgattcgattctcggttcggcgctgggtggctctgaaggacagggaggtgctcgcgatccgaaagtggccctgttgatcgggctggtgaccatgctgatgtcgcgccagggcggtgcggcacagggcggtggcgatggcggtggtctgctcggttcgctgggcagcatccttggtggtgccggcggcggggccgcgagcggcgggctgggtggcgtcctcggcgatctgctcggtggcgccgcgggcggtgccgggcaggcggcgccgggcgtggaggccggctcactgggcggactcggcgggttgttccagatgctccggaacgcaggcctgggtgatgccctgaattcctggatcggcggtgggccgaaccagtcggtgtcggcggcggacatttcccgggtcttcggcgacggtcaattgcagcaactggcggactccgccggagtcagccagggcgaggcggccgaacacctgagcagcctgctgccggaactggtcaacaagctgacgccggacggccaggcgccgcagggcgacctggacatcggttcgctgctggcgcgcttcagctaaggctttcccgtcgatgcggagcggatagccgcgatacggttatccgctccactcaacggggcgaggccgccctcgacggcaggtcggtcaataggcgctggcgctgtccaggcggtggatcgcctgttcgtcgagcttcaggtgggtggcggcgatcaggtcgtcgagctgttccaggctggtggcgctggcgatcggcgcggtcaccgtcggacgagcgatgagccaggccagggcgacctgggtcgggttggcgttgtactgctcggccacttcgtcgagcgccgcgaggatggccacgccgcgctcgttgagataacccttcaccttctctccccgggctcgcccggcggtgtcggcctggttgcggtacttgccgctgaggaagccgctggccagcgagtagtagctgatcaccccgataccgagttcttccaccgtcggctccaggttggtctcgtagtcggcgcgatcgtacaggttgtattcgggttgcaggctctggtagctcggcaggttaagccgggcgctgacctggcgtgcttcgaggaggcgccgggcgtcgtagttggaggcgccgatgacccgtaccttgcctttcttgatcagttcgccataggtggaaagggtttcctccaggtcggtgtggggatcgtcggtgtgcgactggtagaggtccaggtagtcggtctgcaggcgtcgtagcgagcgctccagggcctgctcgatataggcggcggagagacctttgtggccattgcccatgtccatcccgaccttgctggcgatcaccatgcggtcgcgtttgccggtgcgtttcagccacttgccgatgagggtttccgactcgccgccctggtgcccgggaacccagcgcgaatatacgtcggcggtgtcgatgcagttcaggccggcgtcgagcagggcgtccagcagcctgaaggaggtgctttcgtcggcagtccagccgaagacgttgccgccgaataccagtgccggtatctccaggccggagttgccgagtttgcgtgtggtcatgcgtcatccctcctgagtgcggtcctgtgtgggcgctttcgttcgcacgtcttgctgtgactcccggcgggcgcggaatgttcagccggcgcgcagcgtcctatagactctgccggttgccgggattttccaatgccggccctggtaaagcttcagtaaatatccgcagggagcacacgcatgaacagcgacaccgagaatccgttccgcccaccggaggcccgcctggacgagcctgacgccacccatggcgagccgctgtacaggctttccgcgatcggtctgggtaccttcatcggcacgcccctggccggtgccttcctcgcggcggtgaatctccgtcgcctgggacgggcgcaggaagtcgggaaaacctggctggtcggcctctgcctgtttgtcctgctgccagttctgggcgcgatactgccggagaacatcccctcgatcggcttcacggtggcgcagatattcggcatggtctactacgccaaatcagccttcggtccggccctggacagccacaaggcagcgggcggagcgttcatttccaactggcgggcggcggggatcggcctgctgttcatgttggtggtcctgtcggtagcgatcccggtggtgatgctggtggtgtgaggggcagcccgcgctttgccttatcatgagttctttatccgcgatgactggccatgactacacaacgctacctgctcgatgaactggaaaccgccgacatgctcgagatcgacggtctgcacgcctggcgcttcgaactcaacgagaacctgctggaccaggcggacctggcggcggaagccgaccagccgttcgccagcgaagactgggtgctggcggtggaaagcctggatggacgcacccgtcgcgagtggcgtttttcctacaacgcggtgatggaagccgagccccaggccgatggcgagtcctggcgcctgaccacaggggagggggcgtaccagctccgttgcctgggagcggtcagcgccagcggcgaggatgagtgaagcgactcagctgaaagatgcccatgaaaaaagggagccgcctggctcccttttttcccttccgtgccggtcaggccgccttggcctcggcctgggtcaccgcgcggttcagcgcgctgaacagggcgcggaagctggcggtggtgatgttctcgtcgatgccgatgccgtgcagcgggcgctggccctccaggcggatctcgatataggccgcggccttggcattggcgccggcgccgatggcgtgctcatggtagtccatgatttccgccttgaccggcagggcggccaccaaggcttccagcggtcccttgccgatcccgcgccagtgctgcttctcgccgtcgaaggagacttccaggtcgacggcgctggtgccgttctcttcctgcaggcgatggctggcgaggacgtagggcgaggtcgccttgaggtattcgttttccagcagcgagtagatctgttgtgcggtcatttccaggccgagacggtcggtctcgccttgcactacctggctgaactcgatctgcatgcgccgcggcaggctgatgccgtactcctgttcgagcaggaaggtgatgccgcccttgccggactggctgttgacccggatcaccgcttcgtagtcgcggccgatgtcggccggatcgatcggcaggtacggcacttcccagatcgcgtcttccttctgctgggcgaagcccttgcgaatggcatcctggtgcgagccggagaaagcggtatggaccaggtcgccgacatatggatggcgcgggtggaccggcaactggttgcactcttcgaccaccttgcgcaccgcgtcgatgtcggagaagtccagttgcggatgcaggccctgggtgtacatgttcaaggccagggtcaccaggtcgacgttgccggtgcgctcgccgttgccgaacaggcaaccttcgacgcggtcggcgccggccatcaggcccagctcggtggcggccacgccggtgccacggtcgttgtgggtgtgcaggctgatgatcacgctgtcacgcttgtcgacgtggcggccgaaccattcgatctggtcggcgtagacgttcggcgtggcgcactccacggtggccggcaggttgaggatgatcttgttgtccggggtcggttgccagacgtcgatcaccgcgttgcagacctccaccgagaactccagctcggtagagctgaagatttccggcgagtactggaacgaccactgggtatccggttgctcggcggccagcttcttgatcagtttcgcggcgttggtggcgatgtccacgacgccctgcttgtcctggttgaagacgatgcggcggaacgacggggcggtggcgttgtagacgtggacgatggccttcttcgccccgcgcagggattcgaaggtgcgggtgatcaggtcttcgcgggcctgggtcagcacctggatggtgacgtcgtccgggatgtggttgccttcgatcaactcgcggacgaagttgaagtcggtatcggaagccgacgggaaggccacttcgatctgcttcaggccgacctgcaccagggtcttgaagaatcgcatcttcttcgccgcgtccatcggttcgatcagcgactggttgccgtcgcgcaggtcggaactgcaccagatcggcacctcggtgatggtcttcgacggccaggtgcggtcgggcagattgatggccgggaatgggcggtatttctgcgaagggtctttcaacatgctcatggggctaatcctttggagtcggttcctgggccggcggggccaggcgaacgcagtgacgagatgaagagaagcgtcgctcagccacgcagtcgcgggctgaccaggcacaggcaggcgtgttggcggagcaggatgagggtgtgtggtgttttcatgcgtaccacactagtgagactgcatttgaatggcaagcattaaaggaaaattagtagaatttcccatttgtgcggcttttgtgggtttttattctttctctgcggtgaaagcttgtcctcgattgcgccgccggcacgctctccgcaacggaaaattctgcggccccatgccgcagaagagccagccgcccttgtgcgatcatttcgttccccgtgcctggggcgtataacgacaggcgcattcttcttttcggcatgacccggcgcgagcggccatccggcccgctacgcggtggtcttcattcaagacggcgggagtcgcaggtggcgaccactctgaaacgacaaggcatcggtgcatggctggctctgttcgccatgctgatgatcttcgtcgggccgctgatctcccagtcgatgccgatggaccacccgatgccgatgggcgtggggatgggccacgaaggcatgtcccacgagaacatggaccatggcgacatggcccatgccggctgttccgatacccagcgctccgtcgtccatgccggcatgccggggatgggcggcgaggaaggcaatcgcctggccagcgacgtgctctgggagaagtgcggttattgcagcctgttgttccacagcccgccgctcaccgaagacgcctgcctggcgctgttctccgttcccttcgcgacggcgcccgccgtcgctttcctgaacgaggcgttcgtcgcctcgccggtgtttcccggcgcccgtacccgtgcgccgccgttcctgatcgcctgacctctttcaatccgatagccgccgcttcctgggggcaccggcgcgtcttcgccgcgccggtgacgcgagcctggccgggtgcctgctcgccgtgggggcggggcggaagtcacatagatcatggaaaaacgtatgtctactcaacaacgagcggccggcaacgcctgcccgaccgccgctttcagcttcgaccctgcccgtctcgcacaacgccgccgctgggcgggagccttcgccgcactgtgcggcctggccctgtctccgtcggcgctcctggccgaggaacactcacagcaccaggatcacgccgtggagctggcgccgagcgtggtcaccggagtcgcccagagttcgccgctgaccatcgtcaccaatcccaaggagccgcgccaaccggtgccggccagcgatggggccgactacctgaagaccattcccggcttcgcggtgatccgcaacggcggcagcaacggcgacccggtgctgcgcgggatgttcggttcgcgcctgaacatcctcaccaacggcggcatgatgctcggtgcctgtccgaaccggatggacgcgccgacctcctacatctcgccggaaacctacgacaagctcaccgtgatcaagggcccgcagacggtgctctgggggccgggcgcgtcggccgggacgatcctcttcgagcgtgagccggagcgcttcggcgaactcggctcgcgggtcaacgccagcctgctggccggctccaatggccgcttcgacaaggtgctggacgccgccgccggcaaccggctcggctacctgcgcttcaccggcaaccacgcgcagtccgacgattacgaggacggcgccgggaataccgtgccgtcgcgctggaagaagtggaacggcgacgtcgcggtcggctggacccccgacgaggacaccctgatcgaactcaccgccggcaagggcgacggcgaggcacgctacgccgggcgcggcatggacggctcgcagttcaagcgcgagagcctgggcctgcgcttcgtcaaatcgaacgtcagcgatgtgctggagaaggtcgaggcacaggtctactacaactacgccgaccacatcatggacaatttccgcctgcgcactcccgacccatccagcatgatgcccatgccgatggcgtcccaggtggaccgacgcaccctcggcggtcgcctggcggccacctggcgctgggacgacttcaagctggtcaccggggtcgacgccatgcgcaacgagcaccgggcgcgcggctccaagtacgacatgatgaccgactactacaccgacgccgaccagttcccctggaacaaggacgcggtgttccacaactacggggccttcggcgaactgacctggttcgccgccgagcgcgaccggctgatcggcgggttgcgcctggaccgcgcctcggtcaaggactaccggcagaccctgaagtccgggcacatgggccacgccatggccaacccgacggccaacgacacccgcgccgataccctgcccagcggcttcgtgcgctacgagcacgacctcgccgactcgccgaccaccctctacgccggcctcggccatgccgagcgcttccccgactactgggagctgttctcgcccaagcgcgggccgaacgggtcggtcaacgccttcgacaagatcaagccggaaaagaccacccagctcgacttcggcctccagtacaacggcgacaagctgcaggcctgggcctccggctacgtcggggtggtccaggacttcatcctgttcagctatcgcgagggcatgatgggctcctcgacccaggcgaccaacgtcgacgcgcggatcatgggcggcgagctgggcgcttcctaccagctcaccggcaactggaagaccgacgccagcctggcctatgcctggggcaagaacagctcggacgaccgcgcgctgccgcagatcccgccgctggaagcgcgcttcggcctgacctacgaggaaggcgactggagtgccggcagcctgtggcgggtggtcgcgccgcagaatcgcatcgccagggaccagggcaacgtggtcggcaaggacttcgacaagagcgccggcttcggcgtcttctcgctcaacggcgcctaccgggtgactcgcaacgtcaagctgagcgccggtgtcgataacctgttcgacaaggactacaccgagcacctgaacaaggccggcgacgccggcttcggtttctccgccaacgaaacggttcccgagccgggccggaccttctggaccaaggtcgacttcagcttctgaaccttcaacgaggccccgtccagcggggcccgccttgcctgtgtgcgctccgatgaggtgatccatgcaatcgaacgaaaagaacggccgtgacttctacgcgctggcctggcgctggcatttctacgctggcctgttcgtcgcgcccttcatgatcctgctggcgctgaccggaatcgtctacctgttcaagccgcaactggatgcgctgctctatccgcaactgctgcgggtcgaggccggtgcgcagatgcgcagcgccgaccagttgctcgccggggtgcgccaggcgcacccgcaggccgccgtcagccagtacctgccgccgagcgaggcggggcgcagcgcgcaattcgtgattggcgaagagggcaggcaatggaacctcttcgtcgatccctacagcgggcgcgaactcggccgccaggatgcgcagctgaatctccaggcggtggcccgggcactgcatggcgagctgatggccgggaccgtcggcgaccgactgatcgagctggccgccggctggggcatcgtcctggtggtctccggtctctatctgtggtggccgcgcgggcgggcggcgagcgcgctgttctggccgcgcctgcacctgcgcggacgaccgctgtggcgcgagctacatgtgctcgccggtttctggggcagcctgctgttgctgttcatgctgctcagcgggatgacctggaccggctactggggcaagcagttcgccgatgtctggaaccgcttcccggcggcgatgtggaacgatgtgccgacctccgacatgcaggccggtagcctcaacagcgcgtcgcgccagcaggtgccctggccgctggagaacactccgctgccgcgctcgcagccgccggcggccgacgcccatgccgagcatcgcgggcattccgcccaggccgggcacgcgatgccgatggacatgccgatgccggcgggcatccctctgcaaagggtggtggatatcgcccgcgagcgcggcgtggcggcgggctacgggatcgccctgccgagcgggatggagggggtctacacgatttccgtgttccccgacgatccgcgccacgacgccaccctgcacatcgaccagtacagcggcaaggttctcgccgacgtgcgttggcaggactacaacgcggtggcgaggagcgtgcagatgggcgtcgtgctgcacgaaggcaagctcttcggcctcggcaaccagttgctgatgctcgcggtctgcctggcgatcctgctcagctcggcgagcggcctgtggatctggtggaagcgcaagccggccggacgccttggcgtgccgccgctgcgccacgagctgccgcgctggaagagtggcatcgccatcatgctggcgctgggcgtggccttcccgttggtgggggcctcgctcctgctggtctgggcgctggactggctggtgctgtcgcggctgccggcggttcgccgggtcctggcttgagacctgctgcccggcgctcagtcgaggtcgagctggcgggtcttccagagtgccgccagcaacagcacgcagagcagcgcctcggcgccgagccagaggaaggtggttagcgccggcgaggcgtcgatcagcacaccgtagagacgcgccgcgccgccgctggcgatcaccgccagggcggcgagcaggccgagcaccaggtagcgggggcgcagggcggcatagccgagcagcaggccgatgccgaagctggtgccgccgtagctggcgcgcaggtcggtgagggcggcgggggtgagcggttcgccgctggtgagcagggaggcgagcgggccggggaagaagacgaagcccaggccgaggaccacgaacagtgccgagcacagccagagcaggcgaagcgggtgagtcatgcggtgtctcccttggtcatgaaaggggcgcatcgacgcgccccctgttccttctgacctcagccggtgccgcgttgctcacttctcagggctggaaggcaccgatgaagattgccgggtcgactcgcgcgtcgttcaggctgacgttccagtgcatgtgcggtccggtggccctgccggtggcgccgaccttgccgagtacgccgccgcgcggcacctgctggccgagcttcacgtcgatcttcgacaggtggcagaacatgctgatgaagccctggccatggtcgacgaacaccgtcttgccattgaagaagtagtcgccgatgaggatcaccttgccggccgctggcgccttgatcggcgtaccggccggtaccgcgaagtctagaccggaatgcgggttgcgctcttcgccgttgaagaagcggcgcaggccgaaggggctggagagcggaccgtcgaccggcttgtcgagcatcaggttgctgggcaggccgggactgaagcggcggtaggcggcggtctgctcggcgagttcgcgttcgatgcgcttgaggtcttccggcagcggattgacctggcgcttgttcttcagggtgatgcgctgctcgcggtagtgcttgctgccgacgctgaagcgttcctcgtggttgccggtcgccgctcgcacttccagcttctgcgggccgggcttggtgctcagcgggatgccgaccacggcgatccagcggcggccttcctcgcgcaccaccagcaccggcttgccctggtagaaggcccgcggcggcgggccttcctcgccgaggtcgaccaccgccaccccgccgggcaccggcttgttcagcaggcgcatgatgaagctgtcggcctgggcgggcagggcgcagaaagcggcgagcaacagcgtggaaacgaaggctagggtgcggggcatcggcttctcgactcgtcgggcgtcaaagccgtctatgctggcggaagagcgcggcgggggaaagcccgcaagggttgcaaacgttttcacctgcggcactctgtcgcgcccggcgtttttacttttgccccgcgctcaggcataaagggcccattctccggagaaccgacgatgcccctgtcacggcgccccgtggcctggctggccagcctggccgtgctgatgaacctgttcgtggtgccgctttcgcaggcgctgacgacgcaggagcgcgcctcgttgctgctcggtggcttctgcagcacctcgtccgattcgctgctgcgcctgaagctgggtgccgcgctcaaggacatcgatcttcccgacgaccacgagagcctggccccgcacctctgctgctgcgccggcgccgccggcacgcccggactggtcgcctcctggccggcattgccgctggcgccgctggccaaccctgcccgtaacgccttctccgccaccgacctgcctcccctgcgctattggcgcctcgccaatccgcgcgcctctcctgtcgcctgactcctcccccgcgccttcgacaacctggaccttcgggtcggggcaggttgcggcgcaataccctagcttcccccctggaatcgccggtccgacggaaaaagaccggtcatacgctactggagagtcaccatgcgcacatccttcttcgctgccgcggccctgctggccgtttccgctttcgcccaggcccacgagtacagcgccggccaactgcacatcgagcatccctgggcgctggccctgccgccgacctcgccgaacggcgcggcctacttcgtggtgcagaaccatggcaaggaaaacgacaccctgcttggcgccgacacgccgcgcgcggcttccgccgaggtgcacgagcatgtgcacaagaacggcatgatgagcatgcagaaagtcgacagcgtcgacgtcgcaccaggcaaggacctgcgcttcgctcccggcggctaccacctgatgctgatgggcctgaagcagccactggtggccggcgagcgcttcccgctgacgctgcatttccgcaaggccggcgacgtgccggtggaaatcgtcgtcgagtccaaggcgccggccgaacagggcgggcacgagcagcacggccactgagcgccgtgtcgagcaggggcgcccggcgccccgcctttgcgtgtgaggttcagagcatgaacagcaacagatatcccttgccggcgcagaccggcctggtggtggctcccggcctgccgccgaagaactccaccctgcgtccggaccagctcaacaagcgcctgagcagcgcctggcaccatctctacgacctttgcccggaactgctgaagatcgatccgccggatggcctgaccatcctccgcggtttcctgcaatgggcggccgagcagaaggccgcctggaactgggcgatgcacctgcgcctgtactgctggctgttgcagtcgccgttcggcgccaaggtgaccgacgagcatctggaggtgctgatggacgcctccgccgcgcgttggacggtggacgacaccagcgccaaccgcggcatcctcctggccagccagggcggtgcgcacatcacccaggactggaaggcgccgcaggccggcgccggcacgcgtgtgccgctggagcgcctggacctgccggcgccgaactggacattcgcctattgcgcggtgcccgacccgcggctgcgcgagttcccgggctggaagccgttgccggcgcgcggctcgctggtcggctgagcgctcgccgccccgcgtggggggcggcgccgtttcagcggttggccagggcccgctggttggagtcgtagatgttgtcgcgttccggaacgtgccggccggcgaggctttccagccactcctcggtgctgagcacggcggcgaaggaggactgcaggacgatgccgaagatccggtggatctcttccgcgctggcctggccggcgcggttgcggtagggcaccgagccgctggcgtcgtgcaggtattccacctgccagccttcgtggatcgcctggcggatggtcgagtcgtcgcagtgctgggtcatgtagccgaccacggcgagggtgtcgatgtcgcgctcgcgcagccagccggccagcccggtgccgacgaaggaactggccagttgcttttccaccttgtgctggtagggccgcgaggcgaccacctcgtgcagctcggcctgccggctgccgagcgcgaacaacggcgagtccgccggtgccaggtgctgcaccacgacgatcgggatgcccgccgcgtgggcggcatccatggcggcgccgatgcgttccagcgacgattggatggcgggaaattcgatacgcaggttgccgctgacgtattcgttctgtacgtcgatgaccagcaaggcgcgtttgggttgacgtgcgggcatggcgtttcctcctgagtgggtgaggcagattctggtcccggcgcggcgtagcgagtgagtggcctgagagacaactttcgctagaatcgggccaaaccgctcatacccaccgaggtgtgcatgtcccgccagtccgtggccgtggtggccttcgaccgcatcagtccgttccacctgtcggtgccctgcctggtgttcggccaggagtgctacgacccctgcgcgcaggccttcgacctgcgtgtctgcaccgccgagccgggccggctgcgaaccacggtggggttcaccatcgaggccgaggccgggctggaagcgctggccgaggcgcagaccgtgatcgtgccgagctggcgcgatccacacgagcgtccgccacaagcgctgctggatgcgttgatcgcggcccgtgcacgcggtgcgcaactggtgggcttgtgcctgggggctttcgtgctggccgaggccgggttgctcgacggtcgccgcgccaccacccactggatgtgggcggaggatttcgccgggcgcttccctgcggtgcgggtggagcccgacgcgctgtacatcgaggacgacggcctgctgacctcggcaggcaccgtcgccggcatcgactgctgtctgcacctggtccgccagcggctcggtgcgcagactaccaatcacctggcccggcgcctggtggtggcgccgcatcgacagggcggccaggcccagttcatcgagcagccgctgccggacagtgcccaggacggccgtctcggcgagctgctggtgtggctgcggcagaacctcgaccaggcgcacagcctggacagcctggcacagcgggtgctgatgagccggcggaccttcacccggcatttccgccagctcaccggcaccaccgtcagccagtggctgcaggccgaacgcctggccctggcccagcgcctgctggaaaccaccgagcattcggtgcaggcgatcgccgggctggccggcttcggttcggcggtgtcgttgcgccagcagttctccgccgcgttcggcctgccgccgctgggctaccggcgcgccttcgcctcctagtccgccggagggcgcttctgcaactgctggcgccagagcgcgtccatcgcctgcaactgcaccgggccgaacagcgcctgcgtcgcgccggtgtgccaggcccagagctggtcgccgaaatcgtagtgccaccattcgctgggcaggttgctgaaaccggcgtcgagcatcgcgtgatagagcaggcgacggtgatcgcggacgcgtcgctggcgcgtgtcgggctccgccaggcgttcgaagtaggcggtgtaggaggccggcacagcttcgtcgaaggcgctgcccatgtccagccagcggccctgggcgtcgcacagggtgacgtccaccgcgccgccggtgagatgcgggctgggcgcctcgcggctgctgctcggcggcgagacgaactggcgggtgagccgttccagctcggcctcgccggcccgtgggtagtgcgcggccagggcgctggacaggctgtcgtagagatactgctgcacggcgaacggccgccaggcgtccagcaccaccaggcgcacgccgccggggagggcggcggcgacccgcaggagacgctcgaagacctcgccgcgagcgtggcactccgggatcgcgtgaggaatgccgagcttgtggtaggccggccagacgctgaactcgcggctcagcccgagcgcctccagcggcgtgccggcatcgacgatggggatgccggccacggcgtgccagtcgggctccgggagaacggggatggcttgggtgaagtcggtcatggcgtcaattgagcaggcgtggcagccacagggtcagggacgggaacaggatcagcagcgacagcacccccagggccacgaggatgaacggccagatacccttgaacatttccaggatatcgaggcggctgatggtcgccacgatgaacaggcaggcgcccattggcggggtgatcagggcgatggtgatgttcagggtgaagatcagccccaggtgcaccggatccacgccggcggccagcgccaccggagcgactatcggcgtcagcagcatcagtaccgagacttcttccatgagcatgccgcagacgaagatcactgcgctgatgatgaacagcatcagggtcggcgagtggccgaacggctccagcaactgggcgaactcgctggcgacctgggcgtagttgagcaaccagttgaccaccgaagcggcggcgatgatcacgtagatgctggcggtcaggcgtaccgtctcgcgcagcgagttccacagcccgaccaggctcagttggcgctggagcagaccgaccagcgccacgtagagagcgatcaaggcgcccgactcggtgggcgtgaccagtcccaggacgattccggcgacgatgatcaccggcgcgatcagcgcggtcagggcgccggacagcgccgccaggatctcgccccaggccggcgccgcatggcgcgcctgcagcccgttgcggtaggcgtacaccgcgttcagcagcatgaaggcggcggccagcagcaggccgggaatcaccccggcgaggaacagctcgcccaccgaggtgttggtcagcgaggaatagaggatcatgaagatgctcggcgggatgatcggaccgatcagcgagctgcccgcggtcagcccggcggcgaagcgccgcgagtagccttccttttccatggccggcaccagcagggtgctgagtgccgaagcgtcggccgcggcggacccgttgaccccggcgaagaacaccccggcgaccacgttgacgtggccgaggccgccgcggaagtggccgaccagggcgttggccaggcgcatcaggcgcggggtcatgccggaatggttcatcaggttgccggccagcacgaacagcgggatcgccatcagcgagaagatgtccatgccgccgaagaagcgctgcggcagggtgttggcgaacagcgccgggtcgacgaagaggaaccccaccagcgcggtgagcagcaggcagaggaacagcggcaggccgagcaggaggttgaccacgaaggctgcgatcatggcgatggccatcatgcctgcgaccctccctcgacggtggtgctggccggctgccgcggccagggcccctggagcaacagcatgagggtcagcaggccgaagccgagcggcaggctgagcaacggccaggtgcggctgacgcccaggccgaggctgcggaagcgcccggcgttcagcgcgtagcgggtgctgacccaggcggcgaaggcgaagaaggccagcgccagcagccactggtagagcctgagggcctgcgccaggcgcggcggcaggcgttgttccaacaggttgacgcgcatgtgcccgccttccatccataccgcgccgagcgccagcattactgcgccgatgatgaggtagcgggccagttcgtccatccagatcggcgagctgccgagcaggtagcgggcgaacacgccgtagatgagcaggaccaggtcgagcagcaacagcagcgtggcgaggttcagcaacgcggcgcgcatgcccttgagcaatgacggcatgggaggcactccggaaagtcggacaggcgcgcccggccgacggcagcggccgtcggggggcaacgcgcgaaggtcagggggcggtggcgagaccggcgtcgcggaaggccatctcggtccagcgcggctcgatgtcctgggtcttcagccaggccaggtaggacggctggcctttctcgcggaaggcggcgaggtcatcggcggacggctggatgatctgcatgcccttttccttgaggaacgccaggtcgtgctcctgctgggcggcgaccgcctcgcggttcagccgggtggcttcggcggcggcgtcgagcagggcctggcgcgccttcgccgggaggctggcgagcagatcgccgttggccaccaggaactggtcggagtactggatgttggccagggtcaggtacttctgcacctggtagaggctgccgaggatgatgtaggaggtcgggttcatctggccgtcggcgacgccggtgcgcaggcccatgtacaactcggtccaggggatcggcgtgccggaggcgccgaaggcttcgtagagcgccacctggctgggatccatggcgcggaagcgcaggccctggaagtccgccgggccgtggatcggcttcttgccgttggtgaagttgaggaagccgccttcctcgaccaccgccagcagctcggtgccggtgcgctcgcggaaggcctcgcgggcggccttccagtagctgccgctatcgaagaaggcatgggccgcggcggcgtccttgaacatgaagggcgtggcgctgacgtagatctccgggaacagcggggcgatcccggcgaacgaggcgatgttcaggccggggccggtcatcacctgttccatgcgctgctcctcttcgccgagcatgctgttggggtagagcttgaactgcagctcgccgccgctcttttcctcggccaggcgcttgaggttgctggcgaacaggtgcaccaggttcttctcgctgtcggcggcgccgttatagctcaggttgagggtggtggcggcctgggcgaggctgccgcccaggcccagggcggcggccagcagtccggcggcgaagcggcgggcgaggccgcggcgcggattcgtgtgcatgttgttttccttatggcagtccgaacggtcgagggatcggcggcacttcttgtcggggcgcggggccgggtgctcgcacgaaagcgaagcaacgctagccgttgtctcgttgactattcaagtccggacgtgatgcgaaaaagacaacgcctcagcgctgcgagagcccgggcgcgtcgccactgaagaagcgcatgccacggcgcaggtgttccaggcaggcgatcgccgccacggtcagctcgcggcccttgtggctgacgatccgcgcgcgggcgtcgcgcagcgccgggtgggccagcggcaggcaacggatatgcccggcctcgatctcgtggctgaccgtcaactccggcatgaaggccacgccgatgccggacttgacgaaattggtcagcaccgccaccgagttggtgcgcagcttcggccttagctcgatgcgctccagttgggcggcgatcaccgccagttggcccatgccggtgctgttgtggatcaacgccagcgactcgttgcgcagcgcgcgcattggcaccgcgccgcggtgtccggcgagggcatggttggcggggatgatcaggtcgaggggctggcgggtgtcgacgtgcacgtccagttcgccgtcctcgaccggggcgtagaccagggccaggtcgacggcgtcttccttgaccagcgccacgccttcgttggccccggccatgcggacctccagctcgatgccggggtagcgcaggatgaaactctgcaatggctgggagatcaggtcggcgatgaagccctctccgaccgccaggcgcaccttgccctggcgcagcccctgcagggccgacagacgcgacagcacgccctcttcgttggcccgttgctggcggtagtgcgccaccagcagctcgccggcctcggtaggcgccacgccttgcggggtgcgttgcaggaggcgcacgccgagatgttcctccaggctggcgagctgccggctgatggccgaggggtcgatgttcaggtgctgggcggcgcggcgaagagaaccgtggtggatcacctcgttgaggtaggccagggcgcgctggctgaggcggatcatcgcggctcagtccagcagcgacagggtcaccggcgtccggtggttgtcctcgacccgcacctccagttcgccttccgccaggcgcgccttcaggcgctgtcccggctgggtctggccggcatcgcggatcgcccggccacgctcgtcgaggaggatgctgtagccgcggcccagggtcgccagcgggctgaccacgttgagcgtctgcgccagtccttcgaggcgctgacgacgatccttcagtacctcgcgggcggcgcgcggcaggcgcgcggcgaggctgtcgagcttctgccggagcagcgccagggtgcggcccggatgctgtgcggcgagacgcgtctccaggcggaccaggcgttcgtggcggaccgccagctggcgctcgaaggcacggcgcaggcgcatgtccaggtcgtccaggcgctgtgcctgctggcgcaggcgttcgccgggatggcgcaggcggcgggcgacgccttccaggcgcaggcgttcgcgcagcaactggtcgcgcatgcgcagcaccaggcgccggcgcaggccgtcgagacgctgctgcaggtcgccggcgttgggcgccagcagttcggcggcggccgaaggcgtcggcgcgcgcacgtcggcgacgaagtcgctgatcgatacgtcggtctcgtggccgaccgcgctgacgatcggcgtggcgcaggccgccacggcgcgcgccaccgcttcttcgttgaagcaccagaggtcttccagggaaccgccgccacgggccaggatcagcgcgtcgaagccctgccggtcggccagttgcagcgcgcggacgatctgtgcgacggcctcgcggccctgcactgcggtgggcaccagggtcagctcgacctgcggtgcgcggcggcgaaacacgctgatgatgtcgcggatcaccgccccgctgggcgaactgacgataccgatgcggcgcggatgggcgggcagcggacgcttgcgttcgctggcgaacaggccttcgccggcgagtttttccttcaatgcctcgaaggccaggcgcagggcgccgtcgccggccggctcgacggtatcggcgatcaactggtagtcgccgcgtccctcgaacagcgagatcttcccgcgcacctttaccgccagcccgtcgcgcaaggcctggcgtacgcgcagggcgttctgccggaacagcgcgcagcggatctgcgcgttgctgtccttgagggtgaagtagacatggccggaggccggccgggcgaggttggacagctcgccctcgacccagacctgcgggaacacgtcttccagcagcaggcgggcgcgctggttcagttggctgacggtcagcacctcgcgatcgaggccgagccgttggaagggatcgttacgcatgggcggcatgataaggcggcgcaccgggatgtgcgatcaatccttggcttcgttcggcagattctccaggaaatattcgacgaagccttccaccagggggctatcgtcgcgtcgccaggccagcgccacctcgctgtatgcctcggcctcggccagagacatgaagctcacggcgggcggtgcgatggcgcgcatcgaggcgggcaccagggcgacgccgaagccggcctcgatcagttgcaactggctggtcttgcgcgacagcgcgcgcgccgggcgtgggtagaaaccggcgccgaggcagagttcggcggcgcgatagctgaggccgccgcgttgcaggtggggaatggagacgaaggtttctccggccagggcggccagggccacgggggcttcacggcgggccagcggatggtcggcggcgagagccaggagcaacggctcgcggtacagggcgcgcaggtgcagccggggatgctggcgcagcaccggcaggcgcagcaggccaaggtccaggcgtccttcggcgagatcggcgagttgctgctcggaggattgctgggtcagttccaggcggacgccgctctgcgccgcgaggtagccgcgcagcgccgcttgcaggccgcccaccagcggcaccgagctggagtgccccaggcgcagcaggccgtggccgccttcgccgacctcgcgagccaggcgccgggcggcctccaggtcgccgagcaggcgctgcgcgcgtggcaggaaggcgcgaccggccggcgtcagctcgacctggcgcggaccgcggcggagcagtggggtgccgatgctgtcctccagttcgcgcacctgccggctgagcgccgactgggcgacgaacaggcgttcggcggcacggctgaagccgccggactcgacgatttcgacgaagtaatggagttgccgcaaagagatcatcggaagattccccatgccttttcgagatggctacagggctcggattgtattggctggcgcgccgttgcgctcgctagagtgcgcaggtcgtcgttccgggagtcgccatgtcctcgctcgatccgtcagtcctgttcgccgccctgccgttcagcctatggcaatggctgctggtcgaactggccatcgtcctcgcctatgtggtgttcggcatcgccggcttcggcaccgcgctggtcgccggcccgttgctggccggggtgctgccgctgtcgcagatcattccgctgctggtcctgctggatttcagcgcgtcgttcggcaactggctgccggcgcggcggcagatcgccatcactgagctcaagcgtctgctgccctgcatgttgctgggctgtgcgctcggggcgtacggacttctggcgctacgcgcggagctgctgatgctggccctcggcgtgttcgtcagtttctatgcgctctacgcgctgttcctccagccacgcggccagccgcgctggcgggcgacctgggcgttgcccttcggtgtcttcggcgggctgttcggcgcgttgttcggcagcggcggcttcctttattcgctgtacctgaacggacgcctggcgagcaaggagcagatgcgtgccacccagagcgcgctgatcggttgtagcaccttcgtccgcctggggctgttcctgctcgccgggctgtatgccgcgcgcgagccctggctgctcgccgcctgcctgctgccgggcatggcgctgggcctgtggatcggccgtcgggtgaccctgcgtctgtcgcgtgaagccttcgtccgcctggtcacctggctggtgctgtgcagcggcctggcgctggtcgggcgctacctggccgcttgaagcggctgcgccgggcacaggccgaactgtgcggccagctcttcgaggcgctggcgctggaagtcgcggaacgccgcgttgggctgctgcaactcgatgaagtcgcgcagcgggtcgcgcaccgcgctgcgcacgccgctgagttcttcgatcacagccaagccgcagaacggcacgtaggcttccgagtagccgccttcgtggaccaccaccaggcgtccgccggcatgccgctcggccgcgtcgcggaccatcgcggtcatcgcccggaagctgtcgctgtgcagttgcatgcgtgccagcgggtccaccgcgttggcgtcgaagccactggcgaccacgatcaattgcgggcggaagcgctccagcgctggcaacacgatgcgttgcatggcctgcatgtaggcgtcgtgaccgccgccgggaagcagcggcacgttgaggttgaagccacgaccgcgatcctcgccgatgtcttcggcgccgctgtagccaggcgggaagcagccgtcctgatgcagggaaatgctcagcacgtcgtcgcgccggtagtagatcgcctgggtgccgttgccgtggtgcacgtcccagtccagcaccgcgacccgctcgacgccgtggcgcgccttggccgcctcgatggccacggcgatgttggcgaagaaacagaagcccatcgcctggtccggcaggcagtgatgacctggcggccgcgacagcgagtaggcgttgtccgcctggccggcgagcaccgcgtccagcgcggcgatggccaggccggcggagagccgggcgatctcgtagctgcccgggccgatcggcgcgtcctggccgaggctgccgccgccggcgtcgctcaacgccttgaagcgttccagatagtgcgccggatgcacgcgcagcaggtcctcgtcgctcgccggcggtgcgctgcgcagttgcaggcgggcggtcaggccggacacgtcgagcaggcttttcagccggcgcttggtttccggtgattcggcgtgtccggcggcggcaggcggttgcacccagccgccgaccggcagggtcagcgcgtgcgggccggcggcgtgccagaggcagagttcgtcgaagaagaaagcggtacgtcgggtcatggcgggtatccgtggttcgggaaagggtttcagcgtggccggcaggccagggccagcagcagcgagagggcggccaggccggcggcgatcggcagcagcgggaggaaaccgccgctgccttcgatgagtcgtccggccagcgccgggccgatggccagcccgccgccgatgaccaggttggaggcgttcatcaggcggccggagcggtccaggtcggcgaggcaggcgaggatgaacggcaggacgaaggtccaggtgaacttgaacagcagcgcggccagggcgaagcgcgccagcggtggctggccgatcagcaggaggatcgccgcggccatcgccaggtagccgccgagcagcatcaggtcgcgcggcaggcggttgccgatgaaggaggcgcaggccgcccccgcgatgcccatcagggtggcgccggcgagtacctcgccgctggcgccggcaccgatccccgcgccttcggcgatggcgccgatgaaggtccagacgccgctgaggctgatatagaaggtgagcacggcgaggatacccagcccgacccgcagtcgcgagtgaaccgcgccggtactggcgcgggcttccgctggcgggctgccactggggaaggcccgcgacaacggtagggcgaggcccatcaggccggccagcaacaggtagcaggcggccaggccgaagcgttcgaacagcgccggcagcagtgccaggccgacggcgccgaccaccagttggcccatcacccagagcccgtagacccggctcggggtggcggtgctggcggcgctggacaggcagaggatcatcagcgagccgccggcgagggcgctgcagaaacgcagggcgagcagcagcgggtagctgccggccagcgccgaggtcaggttggcggcgatgaacagcaggccggcgagcagcgccgcgtggcgccaatcgacgcgtttcagccaatggaaggccggcagcgtcgccaggctcatggcgcccagctccaccgaaaacaggtcgccgacccgcgccgggctcagttgccactgggtcgccagttgcgcggcgacggcgggggcggtcatcaggatggtcggggtgatcgcggcgaacaccacgattgccgcgagcagcgcgaggttgccagacgccggagaggcgctggcgagagtcttgtcggaagcgctcatggctgcgcctcctcagaacacatggaccaggcgcaacagggcctggctgccatggaaagcattgtcggtggcgacgttgcgcgagagaccgaacatcaggctgttgcgccggtccagccagtggcctagctcgaagccgagttgggtgtagcgctggtgggtgtcgtcgagggtatggccctgcagcttcagttcgccgccatcggcgtgcaccagcttgagggcgccgtaggtgctctggctgaagtcgtaggaggagaaggcttgcaggcgatagagcggtttctgttccaggtcgctgccgaagtagtcgtcgttcttcgcgtagaactgcgcttccaggttggcttccagcacccagtcgcggccgatgccctgggtgtagttgtagacgaaggtggcgccccagcggttggcgccgggcgagacatcggggttcttcgcgtggtactcgcccagcggcagggtgatcagggtcagcaggccgctgtagcggcgccgttccgggtcgttgacgaaaaacagggtgccgccgacctggggatcgccgaaaccggtctcgccggtatgcccgacgctgccgggcaggcgcgcatcgatgtcgacgaagggaatgatgaactgcggcgtgcagagagtgccgcagatgtcgctgaagaacacctggcggtaggccaccgcgttggtcttcagttcggccttgccgttgcgatcggccggcccgtggaactcatgggcgcgggtcgccggcaggtagagtacgccgagcgtggtgcccgccggggcgccgaagaagtcgcgggcgttgaggtcggcggcgccggcctcggcgcccagcaggagcgggatgccgaacagcgcgagggcgctggcggtcggtgcggccatcgaggcggtgcggtgggtcatgtgtcggtctccccggtcgttgtgtgcccggcgttcgtcgcgccggtggtggttgcgccttttcgcaggcgaaagggcgcccatgccgcccttgacggggcggtcgaagcggtgatggcaggggtggagggctgtcagccaggcgggaactggtgcagcaggtgggcgatgctcgccttgtcgttgacgccgagcttggaatagatggtgcgtatgtgatggcgcacggtgttcggcgccaggccgaggtcgcgggcgatctgcttgtaggtcttgccttcgctgaacagcagggcgacgtcgccttcgcgattgctcaactgttcgatcgcgctcggttgccgcgcggtgagcaggtagaggtcgccgacctgccgcgagtcgatcaccaggcgcgcatcgcgatagccctgcgggctggtttcctccggcaactgcggaccggtccagcccggccaggcgccgagcagcaggtcgacgaagccgcgttcggcgcaatgcagcacgccgtagcggtcgcataccgccatggccagagcctggcgttcgagggattcgcgcagggccaccagggtacggatttggttggccgagacggccgcggccaggtgcgccgagagttgcccgaggagcagcttctcctggtccgcgaagggcgggccgccaggcgtgcgatagagggcgacatggtcgctgaggcgggtgatcggatcgacgtggatcacgcagagcagctcaccgatgtcgtgacgcgcgccaagccagcgcagcccggcggtggcctgcatgtcaacggccacggcggtgcccgggcgggcgtgtaccaggccgacggtgatgtcgtcgtggctgatcgatttccagtcctcgacatagtgctcttcgaggttgaacaggtgtgcgctgtgctccaccggcacgccgtcgatcagcgccgcgcggccccaccaggcacgctggaacggcaccagttgctgcagacgttccagcgcggtgcgatggaaacgctccagggtcttgtcgcgcgccagccggttgatgtccagcacggcggcgccgaacgccgcgagcaaggctgcggatgacgaatgcgggtcagtgctccctttcattctctcccccgtcccacttttatagttcttggaatcggcgtcccgccgcctgggcggtcgctgggtgacgtacgcagtatccggccatccgctgccgcgctgccatcctgcaaatgcgggataggacaggcggaacggggcctggcgggcgccttgcaagatatttgcccattcgccgttttcggcgatcaactgcgttgagcggaagcgcgtggctgggtataatgtcgcgcttccatttttcccgtctgggagcgcccgccatgctgcgaatcagtcaagaagccctgactttcgacgacgtccttctgatccccggttattccgaagtcctgcccaaggacgtgagtttgaaaactcgcctgacccgcggcatcgaactgaacatcccgctggtatccgccgcgatggataccgtgaccgaagcccgcctggccatcgccatggcccaggaaggcggcatcggcatcatccataagaacatgggcatcgagcagcaggccgcggaggtccgcaaggtcaagaagcacgaaacggccatcgtccgcgacccggtcaccgtgaccccctcgaccaagatcatcgaactgctgcagatggcccgcgagtacggcttctccggtttcccggtggtggagcagggcgagctggtcggtatcgtcaccggtcgcgacctgcgggtgaagccgaacgccggcgataccgtcgccgcgatcatgaccccgaaggacaagctggtcaccgcccgcgaaggcaccccgctggaagagatgaaggccaagctctacgagaaccgcatcgagaagatgctggtggtcgacgagaacttctacctgcgtggcctggtgaccttccgtgacatcgagaaggccaagacctacccgctggcgtccaaggacgagcagggccgcctgcgcgtcggcgccgccgtcggcaccggcgccgataccggcgagcgcgttgccgcgctggtcgccgccggggtcgacgtggtggtggtggacaccgcccacggccactccaagggcgtgatcgagcgtgtgcgctgggtcaagcagaccttcccggacgtccaggtgatcggcggcaacatcgccaccgccgaggccgccaaggccctcgccgaggctggcgccgacgcggtcaaggtcggcatcggcccgggctcgatctgcaccacccgcatcgtcgccggtgtcggcgtgccgcagatctccgccatcgccaacgttgccgccgccctcgaaggcaccggcgtaccgctgatcgccgacggcggcatccgcttctccggcgacctggccaaggccatggtcgccggcgcctactgtgtgatgatgggctcgatgttcgccggtaccgaggaagcgccgggcgagatcgagctgttccagggccgttcctacaagtcctaccgcggcatgggttcgctgggcgccatgtccggctcccagggctcgtccgaccgctacttccaggacgcctccgccggcgccgagaagctggtgccggaaggcatcgagggtcgcgtgccgtacaagggcgccctgtccgccatcgtccaccagctgatgggcggcctgcgcgccgccatgggctacaccggcagcgccgacatccagcagatgcgcacgcagccgcagttcgtccggatcaccggcgcgggcatggccgagtcccatgtccacgacgtccagatcaccaaggaagcccccaactaccgggttggttgaggctgattgaaatgagtgctgcacggggctgttcgattcagccccgtgtcgttttcgaattccgtagcgagagatggccatgtcccaagacattcacgcccaccgtatcctgatcctcgatttcggctcccagtacacccaactgatcgcccgccgcgtgcgcgagatcggcgtgtattgcgaaatccatcccttcgacatgagcaacgaggcgatcatcgccttcgcgccgcgcggcatcatcctcgccggtggccccgagtcggtacacgaagccgacagcccgcgcgcgccgcaggcggtgttcgacctgaaggtgccgctgttcggcatctgctacggcatgcagaccatggccgagcagatgggcggcaaggtgcagggctccgacctgcgcgagttcggctacgcccgcgtcgacgtggtcggcaaggcgcgcctgctggacggcatcgaggaccacgtggacgacgacggcgtgctcggcctcgacgtgtggatgagccacggcgacaaggtcaccgagatgccggccggcttccacatcctggccagcaccccgagctgcccgatcgccgccatggccgacgatgcccgcgcctactacggcgtgcaattccacccggaagtcacccacaccaagcagggcctgcgcattctctcgcgcttcgtcctcgacatctgcggttgcgccgcgctgtggaccccctcgaacatcgtcgacgacgccatcgccaccgtgcgcgcccaggtcggttcctccaaggtcctgctaggcctctccggcggcgtggactcctcggtggtcgccgcgctgctgcacaaggccatcggcgaccaactgacctgcgtgttcgtcgacaacggcctgctgcgcctgcacgaaggcgaccaggtgatggccatgttcgccgagaacatgggcgtgaaggtgatccgcgccaacgccgaggacaagttcctcggccgcctggccggcgtcgccgacccggaagagaagcgcaagatcatcggccgcaccttcatcgaagtcttcgacgaagaagccaccaagctgcaggacgtgaagttcctcgcccagggcaccatctaccccgacgtgatcgagtcggccggcgccaagaccggcaaggcccacgtgatcaagtcgcaccacaacgtcggcggcctgccggaggacatgcagttcgaactggtcgagccgctgcgcgaactgttcaaggacgaagtgcgcaagatcggcctggagctgggcctgccctacgacatggtctaccgccacccgttccccggcccgggcctgggcgtgcgcatcctcggcgaggtgaagaaggagtacgccgacctgctgcgccaggccgaccacatcttcatcgaggaactgcgcgccttcgactggtaccacaagaccagccaggcgttcgtggtgttccagccagtgaaatcggtcggcgtggtcggcgacggccgtcgctacgcctgggtcgtcgccctgcgcgcggtggagaccatcgacttcatgaccgcgcgctgggcgcacctgccctacgaactgctggagaaggtctcgaaccgcatcatcaacgagattgccggtatctcccgggtcacctacgacgtgtcgagcaagccgccggcgactatcgagtgggagtgaggtcacttccctaaagcatatgtgacaaacgacggccggcaggccgtcgttttttatgcgaggtcccgggcatccaggcaaactttgtcgggctacccatcgactttctccgattggaagtgaaagcttccgttcgctccttgccttcctttgcacgagcgagggaggggtcaccatcagaaagaacagccaggcccatgtcgaacggttatccatatcccaaatatcgcgcggatatcgatggattacgtgcggtggcggtactttccgtcgtcgctttccatgcctttcccgaatggtttcaggggggcttcatcggtgtagacgtatttttcgtcatttccggcttcctgatttccagcatcattttcaaaggactggaaagggggacgttccgcttcgtcgatttctatgtgcgtcgaatcagaaggatcttccccgccttattgctggtgctggctgccagcggtgtgatgggatgggcagtgctacttcctgatgagtacgcacaactaggcaagcacatcgcggcgggtgctggattcgtttccaacctcgtgctatgggcggaggctagctatttcgacagtgcggcggagttgaagccgctgctgcatctatggagcctgggcgtcgaggagcaattctacatcctctggccgttgctggcctggatagcatggagggtccgtatcggtttcctctggcctgtcgtgctgttggccggagcttccttcggactatgcgtctatcggctggacggcgatccggtcggcgcgttctattctccgttgacgcgtttctgggaactgctcgcgggctccgctctggcctggttaactctgcgcaacgagcgagcagagtgtgttctggatgtattcggcaatgacgttctaggtcgtgctttgctttcggcgagcggtattttgctgttggcttgcggtttcgttctgatcgatcggcgctccgcgtttcccggcatcttggcactgcttccggtacttggtgctgttctgcttatcgcagcgggtgagcgtgcttggttcaacagggtcgtactgagcaatccgttactggtctggatcggtttgatcagctaccccctatatctctggcattggccgctactggcgttcgctcggattgcagaggggaatgtgccgagccttgaggtgcgcgcatcgttggcggtgctttcaattgtgctggcatggctcacctatcggttgatcgagagacctgttcgacgcgctgatccggtattcggtagcgctctcctaccgttggcggtcatggcgatagctggtgtctgtggttacaagattcacttgctggaaggcgttgcggagcgtttccccagactcgtccaggatctggcgaaatacagatttccttatgctgtcagctatcgagaggggagttgcttcctcaagccggaacaggcgtaccagagcttccagaagtgcccgccagtcagcgtaggtaagcagggtaatctcttgttgtggggggactctcatgccgcgcacctgtatccgggctacaaggcggtttatggaggggagttcggcatcacgcaacgaaccgcgagtggttgtccgccgttgctgggacttgaaatcgcaagccggccccattgtcgctccatcaacgatgaagtcatgaggtacgtgacgacggcacatccgaacaaggtcgtactttcagccatctggaccaattatgatctgtccgctctcaaggggactatcgatcggctgcgcgcggcgggagtcatcgatatcgatctcatcggccctgtgccgcagtggctagacagcttgcccaagcaactgtatttccggtttcgggaaagcatgccgcacaatgtgcccgctcggatgaccagcggtctggacgagcgtttcattggagtcgacgacatccttagggaaagagctagggaactgggtgtcaactacatatctccgcgaagaattctctgtgacagcgggggatgtctaactcgcctgggagataccggggaccagcttgttgcctgggactatggccatctcaccgatgctggctcggcgtttctcgttggtaagtttgcggcgcattgagcctgtggggcggtcgagcagttgccggtgttcgccagtgctgcggcattttgtgcaaacgcatgtctcgctatgtggtcttcgaaatgagaaaatctatcatttcccagccgcagtaccgcgaaggtgaaggctccatgacatttacccgtagacaagtgctcggcggcctcgccgggctggcggtggtcggcctcggtgccggcggcgcgcgcttctggctggcgcgtccgcaggtggcgcaggagtacgactacgaactgatcgccgcgccgctggacctggagatcgtcccgggcttcagcagtccggcgctggcctatggcggccagtgccccggcgtggagttgcgggcgaagcagggcgagtggctgcgggtgcgcttcaccaacaggctggacgaaccgaccaccatccactggcacggcatccgcctgccgatcgagatggacggcgtgccgtacatttcccagccgccggtgcagccgggcgagagcttcatctaccagttcaagacccaggacgccggcagctactggtaccacccgcacctgatgagcagcgagcagctcggccgcggactggtcggcccgctgatcatcgaggagcgtgaacccaccgggttccgccatgagaaggttctctgcctgaagacctggcacgtggacgagcagggcgccttcacccccttcagcgtgccgcgccaggccgcgcgagaaggcacccgcgggcgctattcgacgatcaacggcaagcatgtgccgaccatcgacctgccggccgggcagatcgtccgggtgcgcctgctgaacgtcgacaacaccgtcacctaccgtctcaacctgcccaacggcgaggcgaggatctatgccatcgatggccatccggtggaaccacgcggcttcgaggggcagtactggatcggtcccgggatgcgcctggagctggcgctgaaggtgccggaagcgggcaccgagctgtccctgcgcgacgggccagtacgcctggcgacgatccgcagtgtggccagcgccgaggctcctgccggcgactggccgaagccgttgccggcgaatccggtgagcgaaccggacctggccaatgccgagaagatcggtttccgtttcgagtgggtcggggcgatgtccgataccagcggcaagaatccctatccgtcgttctggcagatcaacggcaaggcctgggaaggcggcgaggagcacaagcacaacgcgccgccgctggccaagctcaaggaaggccagagctacatcttcgagctgcgcaacatggcgcagtaccagcacccgatccacctgcatgggatggccttcaaggtactggattcggatcgccgggaaatcatcccgtacttcaccgacacctacctgctgggcaagaacgagaccgcccgcgtcgcgctggtggcggacaatccgggcctgtggatgttccactgccatgtcatcgaccatatggagaccggcctgatggggaccatcgcggtcggcgaggcctggtgcgggtgactaagctgatcagcaacggcaagggctacccgacggtaaaaggtgtgcgtccgatcatcgatcgcagccgggacccgcatttcatgcgcgaggccctggcagaggcggaaaaggccgcggccctcggcgaagtgccggtgggcgcggttctggtgcgcgagggcgagatcatcgggcggggcttcaaccggccgatcagcagccacgatcccagtgcccacgccgaaatgctggcgatccgcatggcagcggcggaggcgggcaactaccggctgccaggcagcaccctgtatgtgaccctggaaccctgcagcatgtgttccggactgctggtgcacgcacgcatccagcgcctggtgtacggcacggtcgagcccaagtcgggcgcagtggaaagccgtgggcgattcttcgagcaggagcatctcaaccatagggtcatggtcgagggcggcgtgctggcggaagaatgcagccaggcgctctcggcgttcttccgcgcgcggcgcgaagcggcgaagaagcctcgcgaagactgacggatgtttctcttttcgaacgctccggctgaaacgttaaagcacgccctggcgccttcctctccttcaaaagccatctgcatcaattatttatccggatatttcggacgatcggcataggcgtaaagtcgtagtcgccgcgcgcttccttcgtcgaattgtgtgatattttgcacggccgcttgagcaagcggcccgcaggcaatggcttcaggtgagagcgagcccgcctgcggatacccccgccggaccgcgcagccgaaaagcgcggccggtccggaggcgtccgcgattcccggccctgcattgtcctcgaagaaggccatcggtacggcggtcctggccgcctcccgcacaatgccaattcgaaatgcagggagttgttgtcatgagtgatacccgggtccagcagtatcaggatcacgccggggcggaagccgtcgattcctcgggactggaggtcaagcgcctgacgttcctcgaggcggtggcgatgatcgtcggaaccaacatcggcgcaggcgtgctgtccatggcctacgccagccgcaaggccggcttcatgccattgctgctctggctggcggtggccggcctgttcaccaccatttccatgctctacgtctcggaaaccgccctgcgcacgcgcacccacaaccagttgagcggccttgcccagcgctatgtcggctccttcggcgcctgggcgatcttcctgtccgtggcggtcaacagcatcggcgcgctgatcgcctacatgagcggcagcggcaagatcctcagcgccttcttcggcatcagcccggccctgggcagcgtgctgttcttcattccggccgccggcgtgctgtacctgggactgagcgccatcggcaagggcgagaagttcatcagcatcggcatggtcagcatgatcctgatcctggtggcggccaccctgctcaacgacaacaccgagttcgctcgcctgctcgaaggcgactggatctacatggtcccggtattcaacatcgcggtgttctgcttctccgcccagtacatcgtcccggagatggcccgtggtttcagccacgccccggagcgcctgccgaaggcggtgatcaccgggatgctgaccaccttcgtcctgctcagcatcgtgccgctctcggtgatcgccctgaccggcctggagaaccagtccgaagtcgccaccctggcctggggcaaggcgctcggcgaatgggccttcttcaccgccaacaccttcgccctgtgcgccatgctgacgtcctactggggcctgggcggtagcttcctgaccaacatcttcgacaagttccacaagctcggtccggagaaccggccgaagacccgcctgctggtgctggcgatcgtcgcgctgccgccgttcgtcctggcctacagcgggctggtcggcttcgtcaacgcgctgtacttcgccggggccttcagcggggtgattctctcgatcatgccgatcctgatgctgcgctcggcgcgtaggaacggcgacttcgagccggcctggaaatgcggctggatcgcccatccggcgatccaggcggtgatcgtgacgatctacctggccagcgccgcctacgccatttgtagcgccatgaacctgctgccggccggctggtaggtcatcgctgccggaagaggccgccatagggcggcctttttcatgggatttattttatccggataatattgttgctctatttatatccgggtattattcgggcgttccatccatgggagcctgtcatggccaatgatccatacatccaatccttcacctgcttcgacggcacgcgccggctgctgacggcggcgctgccggaggtcgcgctggccttgaaacaagcggtcgccggcggtgcagccggaccgctgctggtattcgacaatgccactgggcgctccgtcgatctcgatatccgtggttccagcgaggacctgctggcgcgcctggtcgtcgcaggcgagcggcaaccggcggaggaggccgcgccgcgcgggcgcgggcggccgaagctgggcgtggtggcgcgcgaggtgaccttgttgccgcgccactgggaatggctcgccgcgcagcccgggggcgcctcggtggcgctgcgcaagctggtcgaggaggcgcgccgcagccagtccgggcgtgcgcggcaggcgcaggagcgcgcctaccatttcatgaatgcgatggccggcgacctgccgggcttcgaggaggcgacgcgtgcgctgttcgccggggatcgcgagggcttcgccgagcggatcgccggctggccgaccgatgtgcgcgagcacgccgcctggctggcaagcgacggagaatcctgaggggagggggcggctagagtttctcgtcgccgctgtcttcttccgggcgcgtcttgttcacgccgggcaggtgcaacccgctctcggcgatctggctgccttccatctgcggctgggtcacccaggtgaggatgtcgtagtagcgccgcacgttctgtacgaagtgcacggtctcgccgccgcgcgcatagccgtagcgggtcttggcgtaccactgcttctgcgccaggcgcggcagcatcttctttacgtccagccacttgttcgggttgaggccttccttctcggccatcttgcgcgcgtcttccaggtgcgcgccgccgatgttgtaggcggccagggcgaaccagctgcggtccggttccttgatgctctcgggcagttcgctgcggatctgcacgaaatacttgctgccgccctggatgctctgcttcgggtcgagccggttggacacgcccatcgcctgggcggtccggttggtcagcatcatcaggccgcgcacgccggtcttggaggtggcgccgggctgccacagcgattcctggtagccgatggcggcgagcaggcgccagtcggtatccagctgcttgccgctctgcttgaagtggctttcgtagcgcggcaggcgttgctgcaggtgctgggcgaaggtgtaggcgccgacgtagccgagtacgtcgacatgcccgtagtaacggtccttcaggcgttgcagcaggccttccttcttggcctggtcgaggaacgcgttgacctcgttcatcaggctgtcgtcgtcgccccccggcaaggcccaggccagcccgcgggcttcgccgaagtcgaaggcgacgcggacgttggggaagtacacctggttcatcgccagttcgttggagtcgaccagggtcaggtcgatgtcgccgacgtcgaccatgcgcaacaggtcgaccacttcgacagcatcggattcttcgtacttcagttcgggatactgcttcttcagctcggcgagctgctccgcgtggctgctgcccttgagcaccatgatgcgcttgccgaccaggtcttccgggcgggtcgggcgctgctggccgttgcggtagatgatctgcggggtgacgtcgaggtaggtgtgcgagtagcgcacgctggcgtcgtcttcgcgtcccggggtcaggccggccgcggcgagcgccgggccgccctcgcgggaaagctgggcatagaggtcgtcgaggttgtcggcggtctcgatcttcagctcgacgccgagacgctcggcgaagcgcttggccagttcgtattcgaaaccggtttcgccgttgcggtcctggaagtaggtggccgggctgttgcgggtgatcacgcgcagtacgccctccttctgcacgcgctccagggcggtaggggctttcgcctcgctacagcccgcaagcagcagaaagatgccggtcgccaacagccaggcggcgcaacgtaagcggtacgcggtcagggcaaacatcggcgcagtatacgcaaaggcgagacggcgccatatctcgacagccgggaccttctctgctatcgccgggataccgttcgtccgccgtttcgcttgccccgtcgcagagcgctgcggcgccgttctcgaagtgcttcgaagcgggccgccgcggatccgatggagggctatgcgatagccatcggcgcgggtgccgccggacggtgctttacggtagaatgcacggcctctgcgggccggcccggccggcccccacaccttcccgtctccagaggctgttccgacaatgctgatcctgcgcggcgctcccgccctttccgctttccgccacggcaaactgctcgagcaactgacccagcacgtacctgccgttaccgggctgtacgctgagttcgcgcatttcgccgacgtcaccggcgcgctcaccgccgacgaggagcaggtgctggcgcggctgctgaaatacggcccgagcgtgccggtgcaggagcccagcggacggctgttcctggtggtgccgcgcttcggcaccatctcgccgtggtcgagcaaggcctccgacatcgcccgcaactgcggcctggcgaagatcgaccggctggagcgcggcattgcctactatgtgcagggcgaactgtccgagagcgacgcccagcaggtcgccgcccgcctgcatgaccgcatgacccaactggtgctggaccgcctggaaggcgccgccgagctgttcagccatgcgcagccccgcccgctcaccgccgtcgacgtgcttggcggcggtcgcgccgcgctggagaaggccaacgtcgagttgggcctggccctggccgaggacgagatcgactacctgctgaagagcttcggtgaactggggcgcaacccgcacgacgtcgagctgatgatgttcgcccaggccaactccgagcattgccggcacaagatcttcaatgccagttgggacatcgacgggcaggcccaggacaagagcctgttcggcatgatcaagaacacctacgagatgaaccgcgaaggcgtgctgtccgcatacaaggacaacgccgcggtcatcgtcggccatgtcgccgggcgtttcttccccgatccgcagacccgcgaatacgccgccagccgcgagccggtgcagatcctgatgaaggtggagacccacaaccacccgaccgccatcgcgccgttccccggtgcctccaccggttccggcggcgagatccgcgacgagggcgccaccggccgcggcgccaagccgaaggccggcctgaccggcttcaccgtgtccaacctgcagatccccggtttcgaacagccctgggaagtgccctacggcaagcccgagcgcatcgtcaccgcgctggacatcatgatcgagggcccgctgggcggcgccgcgttcaacaacgagttcggccgtccggcgctgaccggctacttccgtaccttcgagcagaagatcgctacccctcacggcgaggaagtgcgcggctaccacaagccgatcatgctcgccggcggcatgggcaacattcgcgacgaacacgtgcagaagggcgagatcagcgtcggcgccaagctcatcgtccttggcggcccggccatgctgatcggcctgggcggcggcgccgcctcttcgatggccaccggcgccagctccgccgacctcgacttcgcctcggtgcagcgcgacaacccggaaatggagcgacgttgccaggaagtgatcgaccgctgctggcagctcggcgagcgcaacccgatcagcttcatccatgacgtcggtgccggcggcctgtccaacgccctgccggaactgatcaacgacggcggccgcggcggtcgcttcgagctgcgcgcggtgcccaacgacgagccgggcatgagcccgctggaaatctggtgcaacgagtcgcaggagcgctacgtgctgtcggtggacgccgccgacttcgagaccttcaaggccatctgcgagcgcgagcgctgcccgttcgcggtggtcggcgaggccatcgagcagcgccagctgaccgtcgccgacagccatttcgacaacaagccggtggacatgccgctggaagtcctgctcggcaaggcgccgcgcatgcaccgcgcggttacccgcgaggccgagctgggcgacgatttcgacgccgccgggctggagctgcaggaaagcgtcgagcgcgtcctgcgccatcccgccgtggccagcaagagcttcctgatcaccatcggcgaccgcaccatcaccgggctggtggcccgcgaccagatggtcgggccctggcaggtgccggtggccgactgcgccgtcaccgccaccagcttcgacgtctacaccggcgaggccatggcgatgggcgaacgtaccccgctggcgctgctggacgccccggcttccggacgcatggccatcggcgagacggtcaccaacctggctgccgcgcgtatcggcaagctgtccgacatcaagctttccgccaactggatggccgccgccggccaccccggcgaggacgcgcgcctgtatgacacggtcaaggccgtgggcatggaactgtgtccggaactgggcatcaccatcccggtgggcaaggactcgatgtccatgaagacccgctggcaggacaatggcgaggacaagagcgtcacttctccggtctcgctgatcgtcaccggcttcgccccggtcgccgacgtgcgccagagcctgaccccgcaactgcgcctggacaagggcgagaccgacctgatcctgatcgatctcggccgcggcaagaaccgtctcggcggctcgatcctggcccaggtccacggcaagctcggccgcgccgtgccggacgtcgacgacgccgaggacctgaaagccttcttcgcggtgatccaggggctcaatgccgacggccatatcctcgcctaccacgaccgttccgacggcggcctgatcaccagcgtgctggagatggccttcgccggtcactgcggcgtcgagctgaacctcgatgccctggccgatagccgcgaagagctggcggccgtgttgttcagcgaggaactgggcgcggtgatccaggttcgcgagggcgccactccggaagtcctcgcgcagttcagcgccgccggtctcgacgactgcgtggcggtgatcggccagccggtcaacggctatgagatcaacctgaactacaacggcgagaccgtctacagcgcccagcgccgcatcctgcaacgcatctggagcgagaccagctaccagatccagcgtctgcgcgacaacgccgactgcgccgagcaggagttcgacgcgctgctggacgaagacaaccccgggctgtcgatcaagctcagctacgacgtcaacgacgacatcgccgcgccctacatcaagaagggcgtgcggccgaaagtggcgatcctccgcgagcagggcgtcaacggccaggtggagatggccgcggcgttcgaccgcgccggcttcgccgcgatcgacgtgcacatgagcgacatcctcgccgggcgggtcgacctggacgccttcaagggcctggtggcctgcggtggcttctcctacggcgacgtgctcggcgccggcgagggctgggccaagtcgatcctcttcaacgcccgcgcccgcgacggcttccaggcgttcttcgcgcgcaaggacagcttcgccctcggcgtctgcaacggctgccagatgatgtccaacctgcacgagctgattcccggcaccgagttctggccgcacttcgtgcgcaaccgttccgagcagttcgaggcgcgggtggcgatggtccaggtgcaggagtcgtcgtcgatcttcctgcagggcatggccggttcgcgcctgccgatcgccatcgcccatggcgaaggccatgcggagttcgagtcggaggaagcgttgctcgaggccgacctttccggctgcgtgtcgctgcgtttcgtcgacaaccacggcaaggtcaccgaagcctacccggccaaccccaacgggtcgccgcgcggcatcaccgggctgagcagccgcgacggccgggtcaccatcatgatgccgcaccccgagcgggtgttccgcgccgtgcagaattcctggcgtccggacgactggcaggaagacggcggctggctgcgcatgttccgcaacgcccgggtctgggtggactgatccggcatggcgggcgatgcggactccaactcgtcgcccgaccttcttcccgaggttcgccgggtctctcccggcgacaccttgcggctctgtacctgcggggcttcggcttcgcttcccgattgtcccgccgactgccgcaacggcctgacgctccacgcgacccgcgagcgcctgttgctgttgtgccgctgcgggcgctccgccgacctgccgtattgcgacggcagccatgcgccttccgcctccgggctgaaggccaggtggcggcgtttccgcggctgagcgtaaatctgtgaacgcccgcacgaaggtgttgtgacgagcgaacaaatgttgcgcttatctgtcgtaaaggcagcgtcaaatattcatcatgtcaaggcaaagtgccattatttggcgtcggcagtcgcacaaccaccgaccgcctcgtgcagcattcgattcgtgcggagaaaacgatgtacaagctgtgtttctatgtgcctgagagccatctggatgtcgtcaagcaagcggtgttcgccgcgggtggcgggcgcatcggggcgtacgacagttgctgctggcagtcccttggccagggccagttccggcccctggacggtagccaaccctacctgggccaggtcggccaggtcgagcacgtggcggagtggaaagtggagctggtggtggccgacgagctcatccacgccagcgtcaaggcgctgaaggcggcgcatccctatgagaccccggcctacgaagtctggcgcctgaccgacatggtcttctgagttttcctcggacaagcaagaagggcggccagttgccgcccttttcgttatccgcctcacggggagagcccgacccggggctgtggcgtggcgcgaacaaccgcttcgcgattatcgaacccgaacgggggagctgtggcgtagggcgaataaccgcttggcggttatccgccgattggccgaggtccagccctcctgccgtcagcgccgcagcagcggttgcagggcctggctcagggccgcggcgcgggggcccaccaggatatggcagatgccgccggcgagggagctgacgccctgtccgccgagacgacgcagttgctcggtggccagcttgcgttcgtccgccacgctgacccgcaggcgggtcagtgcgacgtcccgtacctcgcgcaggttgccggcgccgccgagggcgccgagccaggcctgggcttcggcggcgtcgacggtggcctgcatcgacaccacctcttcggctgcgttcggactgcccagcggcggtacggcttcgcccggttgcgtatcgaagggcagggcgcggcggatctcgtcggcgatgctgtcggcctgtgggccgaccaccacctgcaggctgccggccttgcccggacgtaccacggccatcgcaccgagggccttgagctgggcgtctgaggccttgtcgcggtcgaccaggcgcagacgcaggcgcgtggtgcaggcgtccaccacttcgaggttggctgcgccacccagggcgcggatgaatgccggggcgcgctcggcttcggcgttgtcgcccgattcgctgctcgcgtcgtcttcgcggcccggggtcttcaggttgaagcggcggatgcagaagtcgaacaccaggtaatagatgccggcatagagcaggcccagcggccagagcatccagccgtgggtggaacggccccagcccagggcgaggtcgatggcgccaccggagaaggtgaagccgaggcggatgtcgagcaggtcggtgagggccatggacaggccggtgagcagcgcatgcagcaggtagagcagcggcgcgaggaacatgaaggcgaactccaccggctcggtgacgccggtgaggaaggcggtcaaggccatcgacaggagcagcccgccgatcagcttgcgccgctccggacgggcgttgcggtacatcgccaggcaggcggcgggcaggccgaacatcatcaccgggaacatcccggccatgaactggccgcccttcgggtcgccggcgaaatagcgcgccaggtcaccggtgacgacgcgcccggtttccgggtcggtgaagctgccgaagacgaaccacaccaggttgttgaggatgtggtgcaacccggtgacgatcagcaggcggttcagcacgccgaaggcgaaggcgccgaagctgccgctttccagcatgagttggccgaggccgttgatgccctgttgcagcggtggccagatcaccccgaacagcaggcccaggcagaccgcgctgatcccggtggcgatcggcacgaagcggcggccgccgaagaacgccaggtattccggcagcttcacgtccttgaagcggttatacagggcgccagccaccaggccgctgatgatgccggagagcacgcccatgtcgatgcccggatcgatcaccttgagcaccgagatcatcaccaggtagccgatggcgccggcgaggccggcggtgccattgttgtcgcgagcgaaaccgacggcgatgccgatggcgaagatcagcgccaggttggcgaagatcgccttgccggcgtcgtggaccagcggaatgtcgagcaggtcgacgtcgcccaggcgcagcagcaggccggcgatcggcaggatcgcgatcggcagcatcagggcgcggcccaggcgttgcaggctttcgatcaggaacgggggcatggcggtggtctccgattgttcttgtcaggccagcggccagtgttgcaggcaggcgtcgcgcaccgcccgggcgctgcccaggtccagtagcgcctgggcgtggcggcggcattcggcggcgtcgagctggcgcacccgggtcttgatctcgccgaccaggttcggcccgacggacaattcctcgaccccgaggccgaccagtaccggtgtcgccagcgggtccgaggccagcgcaccgcagacgccgacccagcggccgtggcgggctgctccggcgcaggtctgggcgatcagccgcagcagcgccgggtgcagggcgtcgatgcggtcggccaggccggcgtggcaacggtccatggccagggcgtactgcgacaggtcgttggtgccgatggagaggaagtcggcgtgttcggccagttgatcggcgagcagggcggcggagggcacctcgatcatcaccccgagttcgggcaggcgctcgatccccaactgcgtggccagctcgccgaggcggcgacggatggcgcgcagttcgtcgacctcgctgaccatcggcagcagtatccggcagcgttccagtggttcgaccctcagcagcgcgcgcaactgctggtcgagcagctccgggcgcgcctggccgaggcggatgccgcgcaggcccagtgctgggttttcttccaccggcagcggcaggtagtcgaggtgcttgtcgccgccgacatcgatggtgcggatgatcaccttgcgctggcccatggcgtccaggacctcctggtaggcgttgcgctgctcctcttcgtcgggcgcggcgcggcgctcgaggaagagaaactcggtgcgtagcaggccgaccccgtcggcgccgttggcgaaggcttcggcggcctcgcgcggcgaggcgacgttggcgccgatctcgatgcgccggccgtcgcgggtgagcgcctcgcgctgcgcatcggcctgctggcggcggtgttgttcctcgcgctgcgccacttgcaaggcgacctgctccaggcgtcgagcgtcggggctgagttccagccggccctggccggcgtccagtactacctgccggccttcctccagctccagcagcccggcgccgagcgccaccaggcacggcaggcccttgctacgggcgaggatggccacgtgggaggtggcgccgccttcggccatgcacaggccagccgcgccggcatccaccagcggcgcgaggtcggagggggtgatctcccgggcggcgacgatggccccagcaggcacccgcaacggtgcggtgtcgccgagcagcacccgcagcacgcgtttttccaggtcgcgcaggtcgttggcgcgctcggccagcagcaggttgcccagcgcctggagaatctcgcactgggcctgaatcgcccggtgccaggcgtgggcggcgccgacgccctggtcgatcagcatgtcggcggcgtccagcagacccgggtcttccagcagcgcgagatgcgcggaaaagatcgccgcttcgttctcgtcgccgccgagcctggcctgctgcaggctcccctgtacgtcgtcgcgcacccgttgcagggcctggtccagggcgaggtgctgttcctcgggacgatgccggccgtcatccgccggcaggctgatggcgccgagccgcgccaggggaccgctggccaggccgggcgaagcgcagacgccggccagggtaccggcgacagccgcaggtcgcgccggctcgcccggggcgatggcgcgcggggcctccttcggagcccccgcggtggcgctggcgagggccgcgagcagggcgtcgagggccgcctcgctgtcttcgccgcgacagatcacctctacctcgtcctgttcggcgacccccaggcccatgatgccgaccaggctgtcgacgctggccacctgcccggcgaagtgcagttcggcctggctggaaaagccctgcgcggtcttccgtagcagcgctgccgggcgtgcgtgcagaccgccatgatgggcgacccgcgcccgcccgcggacctggcgctgcgcggagccttcgccaggcgcgggattggccggacgttgctcggccttctccggactcagttgcaggagcggcgcgccgacctccaccgggttggtggtcagcgggcgtacctggaagccgtcgccgttggtcaggatcatcaccgtgatcagactgcggctgccgcgggcgacgcggtccaggtcgaagcgcagcagcggctggccctcgatcacccgcgcaccttcctcgaccagcgcctcgaagccttcgccttgcagctgtacggtgtcgaggccgatgtgcagcagcagctcggcaccgttgtcggcgcgcaggctgagcgcgtggcgggttcgcgccaggtggctgaccagcccggcgcagggcgcgtgcaggcagtcgttgagtgggtcgatggcgatgccttcgcccagggtgccgctggaaaacaccgggtcgggtactcggttgagcggcatcacggggccgctcaggggcgctttgagggcgagattcttgttgttcatgggcgcgctcaggctcagtgggttcgggtgactttgctcaggtgccgtggctggtccgggtccatgccgcgggcttcggccaggccggcggccatgacgtagaaactctggatcgccaggatcggatcgagcgccggatgcgcggcgcgctgcagcggcaggtcgcgttcggcgatgtcgtccggggcggcgagcaatacctgcgcaccgcgctggcgcatatcctcggcgagcgccagcaggccttcctgctccgggccgcggggagcgaataccagcagcggatagcgctcctcgaccagcgccatcggtccatggcggacctcggcgctgctgaaggcctcggcctggatcgccgaggtttccttgaatttcagcgcggcctcctgggcgatggcgtagccggcgccgcgaccgatcaccatcagccgctggcagtcgcgcagggcctcgatggccggcgaccagtcgagcctggcggcctgctccagcccggccgccaggccctggccggcggccagcagggcattgtcgcgctgccagtgggcgagcaggcgggcgctggcgctgagcgtggcgatgaagctcttggtcgctgcgacgctgcgctcggtgccggcgcagagcggcacgacgaattcgctggcggcttccagcggcgaatcttcggcattcaccagggcgatgccgagggcgccgcgttcgcgcaggatgcgcaggctgtccacgagatcggggctctgtcctgactgcgagaaagcgaagacggcctgcccggcgacacgcagcggcgagcggttcagggtcactaccgacatgggcagcgaggccaccggcaagccggcgtgctgcatggccaggtaggcgaagtagctggcggcatggtcggagctgccgcgcgcgacggtcagtgccaggttcggatcgacctcccgcaggcgctggccaagcgccggcaggcaagcgtcgagcacggccagttgacggctcgccaccgcggcggcggagagcgcttcctcgagcatcagcgaagtcattcgagttctccttccaccatcacggcgtcgagttccagggagcgatccaggcgcaccacatcggcccaggctgcgggcgccaggcggccgcgctcggcgaggccgaggtaatcggcggggaattgcgaaaggcgttgcgaggcttcggccaggggcaggccgatcttcaccaggttgcgcagcgcctggtccatggtcagggtgctgccggccagagtgccgtcgggcaggcgcacgccgcccaggcacttggtcaccgtgtggctgccgagcttgtactggccgtcgggcatgccggcggcggcggtggagtcggtcacgcagtacaggcacgggatcgaacgcagggccaccctgatggcgccgggatggacatgcagcaggtcggggatcagctcggcgtagcgtgcgtgggccagggccgcgccgacgatacccggttcgcggtggtgcaggccggtcatcgcgttgtagaggtgggtgaagctgctggcgccggcttccagtgcggccacgccatcctcgtagctgcccagggtatggccgatctgcaggcgtacgccgcgctcggcgagggcgcggatcagcggccggtgtccggcgatctcgggggcgatggtgatcacccggatcggcgcgcggcgcaggtagtcctcgacttcctcgagcaccgcggcatgggcgaagttgggctgcgcgccgagcttgccggagttgatgtaggggccttccaggtgcacgccgagtatccgtgaaccgccctccagcgagcggcggcagtaatcgccgagctggctgaggatgtcggcgatctcctcgcgcggagcggtcatggtggtggccagcagcgaggtcgtgccgaagcgccggtgggtgcgggcgatggtggcgaaggcgtcgccgccttccatgatgtcgcggccgccgccgccgtgcacatgcaggtcgatgaagcctggcagcaggtacggatcggcgttgccggccggatcgcagggctcgccttcgatccgctggatacgcccgtcctggatgtgtaggcggccgaggacccagccttgcggggtgagaatgttgccttcgagcatggcggctccgtgtcggtcagcgtcgcagttcggcgacgaagtcgtagtagtcgttgcggcagtaggtgtcggtcagctcgatcggggtgttgtcctcgaggtagccgatccgggtcatcagcagcatcgcggtgcccggcgcgatgccgaccagcgcggcatcggacgcggaggcgttgatcgcgcgcacgtgctggagggcgcggaccactgggcgaccgatgccgtccaggtattcgtagagggaatcgccgaccgctgtcgggtccggcagcaggcgcgccggcagggtgctgttctcgatcgccatcactgtgccgtcggccttgcgcaggcgcttcatgcgcgcgaccttttcggtcggcgagaggccgaggcggatcagttcgtcgtgggtgggcagggcgatgccgcgctccagccaggtggagccgggggtgaagcctttcaggcggagcatctcgctgaagctggagagacgcgacaacggttgttcgagacgcggcgtaatgaaggtgccggagccctggttgcggcggatcaggccctgctcgaagagtacttcgagggccttgcgcgcggtgacgcgggaaatgttcagggtttcgctgaggttgcgttcggagggcagcgcttcctccgctttccactggccggcatggatcgcgctctcgagattgcgcgccagctgcagatagaggggggtgggttgcgcctcgtcgggacgcagggccaggagcaggtcgtgggctgtcttcatgagaggttccgatgcggattgtgttgttgtcgcccggtaatgctgggaaaactaataccacttgaataccacgtcaatgccagttgtgcgtcgcgcacgcgtcagccagccgtcccgtcgattgactcggcctgagtaagggatgcaagggtttgacggataaaagaaaacgccgccggaaaatctcgcggcggcgttcctggcgtggctgacggctgacgagtggtatcagcctggttctgtcaggggcggatctcgatcagcgtgccgtctttcaccacgctccagacttcgcgcatgtcggtgttgttcatggcgatacagccattggtccagtccagggtggagaagtaccactccgggtattcgtcatccagcggggtgccgtggatcatgatcatgccaccggccggcaggcccttttcccgggccttggccacgtcgcgggcgttggggtaggaaatgtgcatggagaggttgtagttgttgctggtcttgcgccagtcgatccagtagaagccttccggggtgcggttgtcgccttcggccagcttcgggccggtcgggcgcttgcccagcgagacacggtagcttttcaggacgttgcctttgttgaggagcagcagttttcgctcggacttgagcaccaggaccttgtccaccttgccttccaggctcggcgcggcattggcctgggtcagactggcgaaggtcaagcacagcaaagcaagcaaccagcgcatggaagtgaaatccccgatgttcccttgagccgcaacggcggcggtgttcgagtgtttggcgttcagtctttcttataggaagccagcataggtgcaatggcttcgttgcgcaccgggaagcagccttcgcggcggtcgctgaagtagcattctaaggtacggccgatggtcggaaaagccagctccgaccagggaatctccgcttcgtcgaaaagccgcacctccaggctttcatcgccggcggagaaatccaggtcgagcagctcggcgcggaagaacaggtagacctggctgatgtgcggcaggtcgaaaagggtatagagctgcaggtcgccgatccgcgcgttggcttcttcctctgtctcgcgggccgccgcctgggcgagggtctcgccgttctccatgaagccggccggcagcgtccagtagcccaggcgcggcgcaatggcgcgacggcagagcaggacctggccgtcccacaccggcaggctgccggcgacgatacgcgggttctggtagtgcacggtgtggcaggcgtcgcagacgtagcgcaggcggttgtcgccgtccgggatgcgctggaccaccgtggcgccgcacaggctgcagaatttcatgccaggttcttcttcggggaaaggcctatcttgctcggctggccgggaggcgacaaggccccgtgcgggaggggtgggctggccggggctttcgtgccatgatctcggggaaacgacaagacctcggaaaccccggcagtatgaactgcacgctcgacgagctgcgccaacgcatcgaggcgcaccgcccccgccaactggataccgaccagcgcttcccccaagcggccgtgctggtgcccatcacccgcagcgacgatccggagctggtgctgaccctgcgcgccgccggtttgtccacccatggcggcgaggtcgccttccccggcgggcggcgcgacccggaagatgccgacctggtgcgcaccgccctgcgcgaggcggaggaggagatcgccttgccgccgggcctggtggaagtggtcgggccgctgagcaccctggtctcgcggcatggcatcgaggtcactccctatgtcgccttcattcccgacttcgtcgagtaccagcccaacgacggtgagatcgccgcggtgttcaacgtgccgctgagtttctttcgcgacgacccgcgcgaggtcacccaccgtatcgactacttcggccgcagctggtacgtgcccagctatcgcttcggcgagttcaagatctggggcctgacggccatcatggtggtggagctggtcaacctgctgtacgacgaccccatcgacctgcacacgccgccggcttcgttcatcaaactgagttgaccgacggggcgcagaccccggccatgaggagatcgcgatgaaataccgcctgggcgatgcccgcgtcgaagcccatcccgacagctggatcgcgcccagcgcagcggtgatcggcaaggttcgcctggatgccggcgccagcgtctggtttggcgcggtgctgcgcggcgacaacgagctgatccatatcggcgagcacagcaacgtccaggacggctcggtgatgcacaccgacatgggctatccgctgaccctcggcaagggcgtcaccgtcggccacaacgccatgctgcatggttgcagcgtgggcgactacagcctggtggggatcaacgcggtgatcctcaatggggcgaagatcggcaagtactgcatcatcggtgccaacgcgctgattcccgagggcaaggagattcccgacggctcgctggtgatgggctcgccgggcaaggtagtgcgcgagctgagcgagccgcagaagaagatgctcgaggccagcgccgcccactatgtgcacaatgcccgccgttacgcctgcgacctcgtcgaggacccggcgtgaacgagcgaccggtggcttcgccctgcgtgcatgtctgcgcgctggacgagcaggacatctgtatcggctgccagcgcacggcggccgagatcacccgctggggcctgatgagcaacgacgagcgccgcgaggtgctcggtcgctgtttcgagcgcgccaaggcgcaagggctggtcagcggttccgcctgaagcggattccgttttctttcatttccgaggttcttccatgacccgtatcggtacccccctgtcgccgagcgcgacccgcgtccttctctgtggctccggcgagctgggcaaggaagtcgccatcgagctgcaacgcctgggttgcgaagtgatcgccgtcgatcgctatggcaacgcgccggccatgcaggtggcacatcgcagccacgtgatcagcatgctcgacggcgccgccctgcgcgcggtgatcgagcaggagaagccgcactacatcgtgccggagatcgaggccatcgccaccgcgaccctggtcgagctggaggccgaaggctacaccgtggtgcccaccgcccgcgccgcgcaactgaccatgaaccgcgagggtatccgccggctggctgccgaggagctcggcttgccgacctcgccctatcacttcgccgataccttcgaggactaccgccgtggcgtcgagcgcgtcggctacccctgcgtggtgaagccgatcatgagttcgtcgggcaagggccagagcgtcctgaaaggccccgacgacctgcaggcggcctgggactatgcccaggaaggcgggcgcgccggcaagggccgggtgatcgtcgagggcttcatcgatttcgactacgaaatcaccctgctcaccgtgcgccacgtcgacggcaccactttctgcgcgccgatcggtcaccgccaggtcaagggcgactaccacgagtcctggcagccgcaggcgatgagcgcgcaggctctggccgagtccgagcgggtcgcccgggcagtgaccgaggccctcggcggacgcgggctgttcggcgtcgaactgttcgtcaagggcgaccaggtgtggttcagcgaggtgtcgccgcgcccgcacgataccggcctggtgaccctgatttcccaggatctttccgagttcgcgctgcacgcgcgggcgatcctcggcctgccgatcccggtgatccgccagctcggcccgtcggcctcggcggtgatcctggtggaaggcaagtcccggcaggtcgctttcgccaacctcggtgccgcgctgagcgaggcggatacggcgctacgcctgttcggcaagccggaagtggatggccagcggcggatgggcgtggccctggcgcgcgacgagtcgatcgacgccgcccgcgccaaggcgacccgggccgcccaggcggttcgcgtcgaactctgagatgcgccggctggcaacgctggcctggtgggcggcggctctgccgttgctgccgctggcggtgccgctggctatccgcacccgccgccgagccttgcgcctggcgcccgcggcgggacctcgcgaagggctggtcggtgggtccggtgccgaagagccgctgcgcttgctgttgttcggtgagtcgacagtggccggggtcggcgccagttgcctggactacgccctggccggccgcctggccgcggcgctgggcgagcgtctgcggcgcccggtggcctggcaggcgctgggcgagaacggtatcaccagcggcgaggcgcgcgaacgcttgctaccgcaggtggcgggacgtttcttcgaccaggtgatcctggtcttcggcgtcaatgacaccaccagcctgcgctccctcgaacgctggcgcgccgactgcgcggccctgatcgacggcttccaggcggccggcgcgcaggtgacctgcaccgcggtgccgccgctgcagcatttttccgccttgcccgggttgctgcgggccctgctggggtggcgcgggcggctgctcgacgaggcgctgtgcgatctcgctggcgcgaccggcgccggctactgcccgatctcgctggacctgcttccgggctacctggccatcgacggctttcatccgtcgcagctgggctaccaggtctgggccggggccctcgccgactggttggcggcgagggagaagggcggcgtcgcggtagtctgagcgagactcaggacactgcgccgaggtcgttgtcgcgggtttccttcaggcacagcaccgccagcaggctgagcagcgccgctgcggagacgtagccgccgacccagcccaggccgccgatgccgaccagcttctgggcgatatagggcgccaccgaggcgccgagaatgccgcccaggttgtaggccgccgacgcgccggtgtagcgcacgtgggtggggaatatttccggcagcagcgcgcccatcggggcgaaggtgacccccatcaggaacagctcgatgcagaggaacagggcgacgctgaacgtcgagccctggctgagcagcggctccatggcgaagccggaggcgatcgccgccaggctgccgagcagcagtaccggcttgcgtccgaagcggtcgctgagccaggccgacagcggcgtggcggcggccatgaagagcaccgcgaggcacagcagaccaaggaactcctcgcggctgaagccgaggctggccaccccgtagctcagcgagaacaccgtggagatatagaacagcgcataacacaccaccatcgccagggcgccgagcagggtcggccgccagtgctgggcgaacagctcggcgatcggcaggcggaccctctcgtgcttggccatggccttggcgaacaccggggtttccgccagcttcaggcgtacgtagaggccgaccacgaccagcgccgcgctgagcaggaacgggatccgccagccccactcacggaactgctcctcgctgagcagcatcgccagggccaggaacaggccgttggcggcgaggaagccgatcgacgggccgagctggggaaacatgccgaaccaggcgcgcttgccggccggcgcgttctccgtggccagcagcgcggcgccgccccactcgccgccgaggccgaggccctggccgaagcgcagcacgcagagcagcaacggcgcccagtagccgatgctgtcgtagccggggaggacgccgatcagggtggtggatacccccatcagcagcagcgaggcgaccagggtcgacttgcgcccgatgcggtcgccgaagtggccgaacagcgccgagcccagcggacgggcgaggaaggcgatgccgaaggtgaggaaggcgctgagcatctgcgcggtgccggatgtctgcgggaagaataccggaccgatcaccagggcggcggcagtggcatagacgtagaaatcgtagaactcgatggcggtgccgatgaagctggcgactgcgacccgggtggtcgagttggccggttccggagcggcgtcggcggcgagggtggcggcggtcatggtgggaaggtccctggcagtcggggcacgacggagtgcttccgtgcggccggatggttatggccagtgcgccgatgcggcggcgcggcgcccgggtggggcggacgagatcggtcgcgcagggaggatggggctgcgcgccgtgcgccggctggtaccgtcggcatcggggccgggcgggcaggcgggactggcgggtgactggccggggctcgggctgcgggtagcggcggaaccggcggcagggctggataagctggggtcgattatagagcgccgcggggccggttcggcaatcccggatcagacgctggcgtcgctttcgaccagcggggtcagcgcgcggggatgccaggcgcgcacgcttttcacacggttttccgccgactgctggatttccaggcagtaggggccgatgcgcaggcacaccgcgcaatcggggatctgctccagggcttcggtgaccaggccgttgagggtcttcgggccgtcgcagggcaattgccagccaagcgacttgttcagctcgcgcaggttggcgctgccgtcgatgacgaagctgccgtcctcctgggcctggatatccgggttgtcgaggctgtcgaggtcgttgaagtcgccgacgatctcttcgaggatgtcctccagcgtgacgatgccgatcacctcgccatattcgtcgaccaccacgccgatacggcgcttctccttctggaagttcaccaactgggtcgacagcggcgtgctttccggcacgaaatacggctccatgcaggcctggcggagattctccttggtcaggcggccctgggtcagcaggcgcgcgatctggcgcatgtgcacgaccccttcgatctggttgacgtcgtcgcggtagaccggcaggcgggtgtggctggtggtgcgcaactgctcgacgatgacctcgagttcgtcgtcgaggtcgatgccttcgatttcgttgcgcgggatcatcaggtcgttgaccgtgaccttctccaggtccagcaggccgagcagcatgtcatgccggttgacctcgctggcctgggggttgtcggccggatgcagggcctcttcgtcgcggctgcgtccgctgtcgtcctgttccgccgcagcgacgccgagcaggcgcagcagcgcgttgctcagcagggtcagtagccacagcaggggccagcacaggcgctgcaggatcaggagcggcaggctgagcggcagggcgacgcgttccgagcgaagggcgccgtagcggcgcggcagcagggcgccgaacagcagcaggagcagggtcatgccggggatggcgacggccaggccgatgacgccccagtggcgcagcgcggcccaactggccagggcggcggcgctgacgttgaccagggtgcggccgaacaacagggtgccgcgcaggcggtcgtcgtgcagcagcagccaactgctgcgccgggccccgcgcaggccttgcttggcctgcaggcgcaggcggtaacggtcgaggttgagcagggcggtctcgacgcaggagaagaacgccgagcaggcgaccaggagaaccagcaggccgaccaggtacccggggtgcagctcatccatgaaggaggcccatcagatgtgcaggatgaattcccgcaccagcttgctgccgaagtacgccaacatcaacaggcagaaaccggccagggtccagcggatcgccttgtggccccgccagccgagctggtggcgaccccagaggagcacggcgaagaccacccaggcgaagcaggacaggatggtcttgtgcgccaggtgctgggcgaacaggttgtcgacgaacagccatccggacagcagcgacagcgaaagcagcgaccagccgccccagaggaagccgaacagcaggctttccatggtttgcaggggcgggaagttgcggatcagcccggacggatgcttgtgcttgaggcggtagtcctggagcagcagcaagagcgcctggaacaccgcgatggtgagcaggccgtaggccaggatcgagagcaggatgtgggccaggatgcccggctgttcgttgatcggctcgacggtgccgtgggggatgagtaccgccagcagggtggtgagggcgcccagcgggaatagaaggaggagcaggttctccaccggtatccgcaaggtcgccagcagggtcaggagaattaccgcggcggcgatcaggctggcggcgttgaagaagtccagcaccaggccggccggggtcagcaattgctggtagaggctgaaggcgtgggcgaccagtgccaggagtccgaacaggagcagcaggggtttgcccggcgcggtgcgcttggacacacaggcaccctggtaggcggcggtgccgagatagagaacagcagcgatgaggctgggcagcaggggatgcataagtccttgtaatcgcgggcccgaaaggatgggagtttggcatagatcgagcgtcgcgagaaagccgttgcgaacagttctctcgtacctgtggccgggttggcggaccgcctgccgcgggcgccgcgacctcatggtccggcggtcgcttcggcaaagacggaacgcatcggcaaatcaaggacttgaggctggcctccggtcgtcgccggacacacactccgtctttcatcgcgtgtcccgcgacgcgctcttggttataatccgccgcttgccgcaacccccgtggaaggatcgcgcatgttcgaaaaccttacagaccgcctctcgcagacgcttcgccatgtcaccggcaaggccaagctgaccgaggacaacatcaaggacactctgcgcgaagtgcgcatggccctgctcgaggccgacgtggccctgccggtggtcaaggacttcgtcaacaaggtcaaggagcgcgccgtcggtaccgaggtctcgaagagcctgaccccgggacaggcgttcgtgaagatcgtccgcgccgagctcgaggagctgatgggggcggccaacgaggacctggcgctgagcgtcgcgccgccggcggtgatcctgatggccggcctgcagggcgcgggcaagaccaccaccgcgggcaagctggcgcgcttccttaaggaacgcaagaagaagtcggtgatggtggtttccgccgacgtctaccgacccgccgcgatcaagcagctggaaaccttggcgggcgaggtcggcgtaaccttcttcccttccgacgtcagccagaagccggtggccatcgccgaggcggcgatccgcgaggcgaggctgaagttcatcgacgtggtgatcgtcgataccgcaggccgcctgcacatcgatgccgacatgatggacgagatcaagcaggtgcacgcggcgatcaagccggcggaaaccctgttcgtggtcgatgccatgaccggccaggacgccgccaacaccgccaaggccttcaatgacgccttgccgctgaccggtgtggtcctgaccaaggtcgacggcgacgcgcgtggtggtgccgcgctctcggtgcgggcgatcaccggcaagccgatcaagttcctcggcatgggcgagaagagcgaagcgctcgatccgttccatcccgaccgcgtggcctcgcgcatcctcggcatgggcgacgtgctcagcctgatcgaacaggccgagcagaacctcgaccgcgacaaggccgagaagctggcgaagaagatcaagaagggcaagggcttcgacctggaagacttccgcgaccagttgcaacagatgaagaacatgggcggcctcggcgggctcatggacaagctgccgatgctcggcggggtcaacctggcgcagatgggcaatgcccagggtgctgcggagaaacagttcaagcagatggaggcgatcatcaactcgatgacgcccggcgaacggcgcgatccggaaatgatcagcggctcgcgcaagcgccgcatcgcccttggctccggtacccaggtgcaggacgtcggccggctgatcaagcagcacaagcagatgcagaagatgatgaagaaggtcaccgccaagggcggcatggccaagatgatgcgaggcatgggcagcatgttcccggggggcatgcccaagctttgatcggacgcgcggccgctggccacgccgacggtttcgcgccgtcggccggcgggcggaccgtgtgcttcccgcgctctccgcgccggccgatgggtggccgaaaaagagatttgcaaattccccgataatccttagaatatgcggcctttcgggccgtgggcccagcgtgcattcattttgcaagcaccgactacaggaacgaagttcacatggtaaccatccgtcttgctcgtggcggctccaaaaagcgccccttctaccacctgaccgtgaccaacagccgcaatgcgcgcgatggtcgcttcgtcgagcgcatcggtttcttcaacccggttgcgactggtggcgaagtgcgtctgtccgtcgaccaggagcgtgctacctactggctcggccagggtgcacagccgtctgagcgcgttgctcagctgctcaaggacgctgccaaggcaaacgcctaagccgtcatgagtgaaatgccgacacccgccgacgacctggtcgtgatcggcaagatcgtttcggtgtacggcatccgcggtgaggtgaaggtgtattcctttaccgacccgttggacaacctgctggactatcgccgctggacgctccggcgcgacggcgagattcggcaggccgagctggtcagggggcgcctgcatggcaaggtcctggccgccaagctcaaggggctcgacgatcgcgaagaggcccgcaccttcaccggttacgagatctgcatcccgcgtagcgagttgccctctctcgaggaaggtgagtactactggcaccagctggaaggcctgaaggtgatcgaccagggcgggcagttgctcggcgtgatcgaccatctgctggaaaccggtgccaacgatgtcatggtggtcaagccctgcgcgggcagcctggacgaccgcgagcgcctgttgccctacaccgggcagtgcgtgctgtcgatcgacctggccgctggcgagatgcgggtggactgggacgcggacttctgatcatccatggacaagcgtttgtgggtgggcgtcgtcagcatctttccggagatgttccgcgcgatcagtgactatggcatcaccagccgtgcggtaaagcaggggttgctcacgctgacctgctggaatccacgggactacaccgaggaccgccaccagacggtggacgaccggcccttcggcggtggccctggcatggtgatgaagatcaagcctctggagggcgcgctggcggatgccaggcaagccgccgggggcaggaaggcgaaggtgatctacctttcgccgcaaggccgccagctgacgcaggcgggcgtacgcgaactggccgaagaggaagcgttgatcctcatcgccgggcgctacgaaggcatcgacgagcgcttcatcgaagagcacgtcgatgaagaatggtcgatcggcgattatgtcctgtccggcggtgagttgccggccatggtgctggtcgatgcagtgacgcggttgctgcccggtgcattgggtcatgcagattccgccgaggaggactccttcacggatggcctgctcgactgcccgcactacacccgacccgaggtgtacgcggacaaacgtgttcctgaagtgttgctcagtggcaaccatgaacacatccggcgttggcgtttgcagcaggcccttgggcggacctgggaacgacgcgccgatcttctggatagccgctcgctttctggagaagagcagaagctgctggcggaatatatccgtcagcgggacgatagttaacgtatcgatggctggccgattgccggtcttaggagcacagcatgaccaacaagatcattcagcagatcgaagctgaacagatgaacaaagagatcccggcgttcgcccccggcgataccgtgatcgtccaggtcaaggtgaaggaaggcgaccgtcagcgtctgcaggccttcgaaggcgtcgtcatcgccaagcgcaaccgtggcctgaacagcgccttcaccgtgcgcaagatctccaacggcgtgggcgtggaacgtaccttccagacctacagcccgatcgtcgacagcctgagcgtcaagcgtcgcggcgacgtgcgcaaggccaagctgtactacctccgcgccctgtccggcaaggccgcgcgcatcaaggaaaaactggtctaatccggttcttctccgagaaaagcagcccgagggctgcttttttcatgtctggcgttcgcctttccggcggcgtttcctactgcccacggcagcgcataaccagtacaacatccgcggcacccaggcagccactccatccggtattcgtggcatgacccccagagagcaagaaatcctgcgtcgcaccgagctttccgaaacccgtgtgaccaaggcggtattcccgcccaccaccaatcaccacaacaccctgttcggcgggactgcgctggcctggatggacgaggtctcgttcatcaccgcgacccgtttctgccgcctgccgctggtgaccgtttccaccgatcgcatcgacttcaaccacccgatcccggcgggctcgatcgtcgaactggtcggacgggtggtcaaggtcggcaacaccagcctcaaggtggaggtcgaggtgtacctggaaagcatgtacgccgacggtcgcgagaaggccatacacggcctgttcagcttcgttgccatcgacgacgaaaagcggccggttccggtcctgccggggttcccggccagccaggcggcttgatacaggcagaaagaaggcacccacgggtgccttttccatatccccggacgatccggccctgggttgggatcagggccgcaggctgatcttcagggaggcctgggacaggtcgatctgttgcaggctgacgctgccgaacgtctgctcgcgcggcgcgccggcaatgcggatattgtcgaagcgcacctcgccgatactgctcggcaggcgcaggttgaccgagccgtcggggttgagcgtgctttgcgtcttgccggtttcgtagcgaacgtcgctcatcgaggtttccgcctccaggctgtcgagcatcggcatcaccagcttcgccagttgcttcaccgcggccagtccgtcgccgccctcggccttcaggaacaggccctcgaggctttcgttgaggccctgggcgttgacgttgctcatctcgacgtcggtcagcggacgcaggttcttcggcagttcctggcggctcatggccgctggcggctgcatacgctggatgtcggcgctggccatctggaacggactgagcagggcggcgaccagggtcgcggccaggcgcaggttggtctgcttcttcagcgccttcttcagttgccgttcgctcagcaggccctgctcgatcagggtttcgcccaggcgcttgtggttgctcaactgcgcctggatcgcggcgtccagttgggcggcgctaatcagccccttgttgatcaggatctggcccaggcgggaatgttgttgattggacatggtcatggcctgatgaaaaaagaggatgatggctagatgcaatcatcctcttcgtgggcttcgtttgtcacccaaccttggatagggtgacgacggtctttcgtcggttcgttgaagtctagtcggcgatttccgtggcctgcgacttgctgactgacggttccgcgtcgatcagcgacagcagcgtccagccggtgcccggcgccagcgtggactgtggcgtggcgacgtgcatcctgccgttcggatcgcgggcgaacagcaggatcgcggactcgccgtgcagcgcctggtagtcgttccagccgaaggtgtcggtgagcagggtggtgcggatttcggcgccgcgcgacagcaggctggcgaactgcgcgtaggtcagcggtcgctggccaagcggacggccacggtgttcgtcgctggagcggtgcttgtcggtacgcttggcttcctggctggtcggcaggccgaacagctggcgatggccgaactcgtggcggaagcgcatggccgccagggtattcagctcgccggctggagaaacccccagcaaatgcccgatgccgaccaggtcgaggtgggcttcggcgtgctgcgaggtgggattgccgaaataggtgggcaggttgtccatgcgggcggcgcggatgttttcccagctcgaatcagtcagcagcacgcggctgccgaggctcttcagggccttgccgatggcgcgcccgaccggattggcgccgacgatcaggtagccgctgggcgagggctcggcgaccttcagcaggcgcgccagggggcgggcggtggcgctttgcaggaccaccgtgccgatgatcaccagaaaggtcagcggcaccagcagcgccgcctgggcatggccttcggcgctcaggcggatggcgaagatcgccgagaccgccgcggcgacgatcccgcgcggggcgatccagctgagcagggcgcgctcgcgccagctcagcggcgaaccccaggtcgacagcgccacgttcagcggccgggcgacgaactggatcagcagcagcaccagcagcgccgccgggcccaggccgagcagggcattgatgtccaggcgcgcggccaggaggatgaacaggccggaaatcagcaggacgctgaggttttccttgaagtgcaggatctgccgtacgtcgacgcccttcatgttggccaggcccattcccatcagggtgacggcgagcagtccggattcgtgcatcacccggttcgaggcgatgaatacgcccagcaccgcggccagcgtcgccaggttgtgcaggtagtccggcagccagtggcggcgcaggacgatgcccagcgcccagccgccgaggatgccgaacaggctgccgcagaggatcaccccgccgaaggtctgcaggctgtgcagccagccgtcgccttcgccgctggagatgatgaagctgtacaccactaccgccagcagggcgccgatgggatcgatgacgatgccttcccagcgcaggatgttcgccaccgcggccttgggccggaccacccgcagcatcgggacgatcaccgtgggcccggtgaccagggtcagggtgccgaacagcagggccatttcccagctgaagtcgagcaggtagtgggcggccagggcgatcacgccccaggtcgagagcgcgccgatggtcaccatccggtgcaccacggtgccgatttccttccattcgctgaaatgcagggtcaggctgccctcgaagaggatcagcgccaccgccagggataccagcgggaacagcagggggccgaacatctcgtccggatcgagccagccgagcagggggccggcgacgatcccggacagcagcaggaaaagaatggctggcaggcgcaggcgccaggccagccattgactgagcagggcggcggcaccgatgccgccgagggcgagcaggatagcgttctggtccatcgaggattccttgtcagcgtcgctccgctcgtcctgagccggggcgaaccatcgagccacatggctccgctttttcccgcgggcacgggaagccggccgacctcctgtcgaccggcctgactaaccattacgtggcgatgacggccaacgctcgcgatagcgcccaggctatgaaagactagccgcgctttcatttggttcgcagccttcatccatgagtaccctcgaacatcccctgatcgaccgtttcctcgatgccctgtggctggaaaaaggccttgccgacaacacccgcgaggcttatcgcaacgacctccagcagttcaacgcctggctcgatggccgcgggctgcgcctggagggcatcggccgcgacgccatcctcgatcacctggcctggcgcctggaacagggctacaaggcccgctcgaccgcgcgcttcctctccggcctgcgtggcttctatcgctattgcctgcgcgacggcctgatcgccgaggatcccaccttgcaggtggacctgccgcaactgggcaagccgttgccgaaatccctctccgaagcggacgtcgaggcattgctggcggcgccggaagtcgacgacccgctgggcctgcgcgatcgcaccatgctcgaagtgctgtatgcctgcggcctgcgggtcagcgaactggtcggcctgaccctggagcaggtcaacctgcgccagggcgtggtcaaggtgttcggcaagggcagcaaggagcgcctggtgccgctcggcgaggaagccatcggctggctcgaacgctacctgcgcgaggcccgcggcgacctgctcggcgggcggcccagcgacgtgctgttccccagcctgcgcggcgaacagatgacccgccagaccttctggcatcgcatcaagcatcacgcgcaggtggcggcgatcggcacgtcgatttcgccgcacaccctgcgccacgccttcgccacccacctgctcaaccatggcgccgacctgcgggtggtgcagatgctgctcggccacagcgacctgtcgaccacccagatctatacccatatcgcccgggcccgcctccaggatctgcacgcacgccaccacccgcgaggctgacgctttgtccgaaaaatccgtacctacccgaaaagaggcgctttcgtagcgttctgcgacaagcgtcgggcccgtcgggatagtggtctatggtaggcttcgccgaccgcacgacaggagtgacacatgcgcgtgacccgttttctggctgctgccgccctcggcctgatgagtaccctggccctggcagacaatgccgatcagaacatccgcaagaccctgcaggccctgcaaccggacctgcccatcgactccatcgccagcagcccgctgcaggggctctaccaggtgcagctgaagggcggccgggtgctctacgccagcgccgacggccagttcgtcatgcagggctacctctaccaggtgaaggacggcaagccggtcaacctgaccgagaaggccgagagccaggcgatcgccaaggcgatcaacggcgtgcccgccagcgagatggtggtgtatccggccaagggccaggccaaggcgcacatcactgtgttcaccgataccacctgcccgtactgccagaagctgcatgccgaggtgccggacctgaccgagcaggggatcgaggtgcgctacatggcgttcccgcgccaggggccgcagtcggcgggcgacaagcaactgcaggcggtctggtgtgcgaaggagccgaccaaggcgatggacgccatgatgaacggcaaggagatcaagtcttcagagtgcaagaacccggtcgacaagcagttccagatgggccagatggtcggggtgcagggaacgccggcgatcgtccttgccaatggccagttgctccccggctaccagccggccaagcagttggccaagctggcgctggaggccaaatagcgccgggtctgccgaacaattgactaataaagagccgcttcgtaatgtgcggctcttttgttttcatcattggcgatttccgccgcccgctggcggaatccatcgccaggatgtgtcgtggcccgtacagtggtcgcgtcaacctcgattcgatcggggaaccatagcaggccggcgcgtccggccgtcgtaggtgagatggggagttccagcgtgaaaccggtcaaagtaggcatctgtgggttggggaccgtcggtggcggtaccttcaatgtactcgaacgcaacgccgaggagattgcccgccgtgccgggcgcggtatcgaggttgcgcagatcgccgcccgccggccgaacccgaagtgcgataccggtgcgacccccatcaccgccgatatcttcgacgtagcgtgcaatcccgagatcgacgtggtcgtcgagttgatcggcggctacaccctggcccacgagctggtgctcaaggccatcgagaacggcaagcacgtggtcaccgcgaacaaggcgctgatcgccgtgcacggcaacgagatcttcgccaaggcccgcgagaagggcgtgatcgtcgccttcgaggccgctgtcgccggcggcatcccggtgatcaaggcgatccgcgaggggctgtcggccaaccgcatcaactggctggccgggatcatcaacggtaccggcaacttcatcctcagcgaaatgcgcgagaagggccgtaccttccccgacgtgctcgccgaggcccaggccctgggctatgccgaggccgacccgaccttcgacgtggaaggcatcgacgccgcccacaagctgaccatccttgcctcgatcgccttcggcattccgctgcagttcgacaaggcctacaccgaaggcatctcgaagctgaccagcgccgacgtcaactacgccgacgccctcggctatcgcatcaagcacctgggcgtggcgcgtcgcaccgagagcggcttcgagctgcgcgtgcacccgaccctgattccctcggatcgcctgatcgccaacgtcaacggcgtgatgaacgcggtgatggtcaacggcgacgccgtcggctcgaccctctactacggcgccggtgccggcatggaaccgaccgcttcctcggtggtggccgacctcgtcgacgtggtccgcgccatgacctccgatccggagaaccgcgtaccgcacctggcgttccagccggacgcgctgtccgaccacccgatcctgccgatcgaagcctgcgaaagcgcctactacctgcgcatccaggccaaggaccacccgggcgtactggcccaggtggccaccatcctgtccgagcgcggcatcaacatcgaatcgatcatgcagaaggaggccgaggaacaggacggcctggtgccgatgatcctggttacccaccgggtcatcgaacaacgcatcaacgatgccatcgccgccctggaagcgctggaaggcgtgtccgggccggtggtccgtatccgtgtcgaacaactgaattgatcgaacgccgggcgccgctcgcgggcccgcgtcaacagcgaaggttttgaacatgcgttacatcagcacccgcggccaagcgcccgccctgaacttcgaagatgtcctcctcgccggcctggccagcgacggcggcctctacgtcccggaaaacctgccacgcttcaccctcgaggagatcgcctcctgggtcggcctgccctaccatgagctggccttccgggtgatgcgcccgttcgtcgccggcagcatcgccgatgccgacttcaagaagatcctcgaggaaacctatggcgtcttcgcccatgacgcagtggcgccgctgcgccagttgaacggcaacgaatgggtgctggagctgttccacggcccgaccctggccttcaaggacttcgccctgcaactgctcggccgcctgctcgaccatgtgctggccaagcgcggcgagcgcgtggtgatcatgggggccacctccggcgataccggctccgcggccatcgaaggctgccgccgttgcgacaacgtcgacatcttcatcatgcacccgcacaaccgcgtgtccgaggtgcagcgccggcagatgaccaccatcctcggcgacaacatccacaacatcgccatcgaaggcaacttcgacgactgccaggagatggtcaaggccagcttcgccgaccagggcttcctcaagggtacccgcctggtagcggtgaactcgatcaactgggcgcggatcatggcccagatcgtctactacttccatgccgcgctgcagctcggcgcgccgcatcgctcggtggcgttctcggtgccgaccggcaacttcggcgacatcttcgccggctacctggcgcgcaacatgggcctgccggtcagccaactgatcgtcgcgaccaaccgcaacgacatcctgcaccgcttcatgagcggtaatcgctacgacaaggacaccctgcatccctcgctgtcgccgtcgatggatatcatggtctcgtccaacttcgaacgcctgctgttcgacctgcacggccgcaacggcaaggccgtcgccgaactgctggatgccttcaaggccagcggcaagctgtcggtggaagaccagcgctggaccgaggcgcgcaagctgttcgactccctggcggtcagcgacgagcagacctgcgagaccatcgccgaggtataccgctcctgtggcgagttgctcgacccgcacaccgccattggcgtgcgtgccgcccgcgaatgccggcgcagcctgagcgtgccgatggtgaccctgggcactgcgcatccggtcaagttccccgaagcggtggagaaggccggcatcggccaggcgccggcgctgcctgcgcacctcgccgacctgttcgagcgcgaggagcgctgcaccgtattgccgaacgagctggccaaggtacaggccttcgtcagccagcacggcaatcgcggcaagccgctctgagcctgtcgtgaaaggaagaagcccgccttgatggcgggctttttcatgtcttctcaaagggcagcggcgagtttgttgcgcgaggggcggagcagcctcagtggatcgttgaactggatgtcgctggccagcttgtagtagcgcccgacgaaatagtcgcgggcctgggcatcgttctttccctggtacagcgcccaggcgacgctgatgccggcgaactcgttgtactcgatctgtcgcagcgggctgaagtgggtcgccgtggtggccgtggcgccccaggcgggcacgtcgcggatcaacgggccctgccagaggatcggccaactgagcggcggcacgaccacatcggccagtccggtcagcagcagggtcggggtctttaccgtggaaccgatggccagggggcctggctcgatcggcagggcgccgaccagcttcaaccgtggctcgatgagttgcagggcttgggcagagaggctggcgctctgcagtgtggcctggccgccggcggagtgcccggcgaccagcgtccgggaaaagtcggcccggtcatgcagggccgaggccgggtccctgtccagtttcgcgacctcaaggatgccgagggcgtgcatcagcgggaaggaattgatgaagtcggaggagatcaccacgatgaagccgtggctggcccaaagtttcatcagttcgtgatagttgccggcgttggaaagtatgccgccgacgaaagtgatgaccggaagcttggcgtcggacgcggcgatgtccgccgggtagtagacgctggtactgatcgggctggcgaagccataggggaaagcctcgttgcagcggatcgagccgtccagcaggacgatcctggcgatggtcccgacgaagccacgacaatcggcgagcacggcggtgctggcgatctcggtgtcggcgaccggacgcgcgtactggtcgttggccaggcccacggcgccgaacagcagcgagccctgtgccgtgccggcggcgaatgccagcgcgaggatgaaggcgcgccaggtgccgcggggggatgcgaaggcagtcatgagatcctcgctgttcgatgcgcagggggaagtctcgttattactgcctgacggacgcgccggatactgcaatttcaagcaggtgaaggcgttgcgcgagggtgggatggttggagtttttcccggtgcttcccttatagcgggctgatcgttgcgttggcctggttcggctcgaatggctatttgcgccggcacgtggcctttcgccagatgctgccgttagtccggtaaatgcttgcatcgacgaaccctattcgcgttttttcggtctttgacgagtcttattcgtcgaaacaggagacctgatttggacagcctgaagcaacgactggccgatgccttcgctccccatcccttcaccctcagccagccccggcccgatggcggacgggtggtcacgctggtcgatccgcagggggaaaccctgttgcagcgggtcatcgccaaggtgcagttgaacgacgaaagctatctcgaggatgccgtgcagaccattcgccgggaattgcaggtgctggtcgggcggatggaggaagacgtgctggcgaccttccgcgagcgggatcacgtgctgctgtattcgtcgcgctagcaccgtctcgttcgagggcgcgttgcgcatcgggcggtcaggccgaaggcgcgcgccggtgcagcggctcttaccggatggcgccatgctcgtggaagcgtgcggataaccccctctccctgactggataggggagagggggctgcactgtccgcggagcaccgatgaagggctccgcgtaccgttcagatggcgccttcccggcgcagggcggcgatgccctcgctgtcgtagcccagctcggcgagcagggcatcggtatgctcgcccagttccgggcctacccaatccgccgagcctggcgtggcggacagcttgggtacgatgccaggcatgcggaatggcttgccgtccggcaagcgtgccgagaggaacatctcgcgggcaaggaattgcggatcgcggaacatgtcttcggcggagtagatgcggctggccgggacttcggctcgcgccagcactgccagcacttcctccagggactgcgaggcgacccagcggtcgataaccccatagagttcgtcgcggcgcgcatcgcgcccgtcgttgctggccagttgcgggtcgctggccaggtcgtcgcggccgatggcctgcatgaagcggcggaagatcgcgtcgccgttggcgccgatctgtacgtggcggccatcggcgctggtgtggatggaggagggggtgatgcccggcatgatgttgccggtgcgctcgcggatgaaaccgaacacgtcgaattccggaaccatgctttccatcatggcgaagatcgcctcgtagagggcgacgtcgaccatctgtccctcgccgccgttgacctcgcggtgtcgcagcgccatcagcgcgccgatcacgccccacagggcggcgatcgagtcgccgatggaaatcccggtgcgaaccggcgggcggtcctcgaagccggtaatgtagcgcagtccgcccatcgactcgccgaccgcgccgaagcccggctggtccttgtaggggccggtctggccgaagcccgacaggcgcaccatcaccaggcgcgggttcagcgcgtggaggacatcccagcccaggccgagcttttccagtacgccggggcggaagttctcgatcaggatgtcggcatcgccgagcaggcgtttcaggatcgcctggccttcggcgtgcttgagattgagggtcagggatttcttgttgcgtgcctgaacgaaccaccacagcgaggtgccttcgtagagcttgcgccacttgcgcagtgggtcgccgccgtcgggcgactcgatcttgatcacttcggcgccgaactcggcgcagatccgcgaggcgaaagggccggcgatcagggtgccgagctcgaccaccttcaggccggccagcggtttgggcgaatgttccatgcggtgtccgtcaggctgcagtgtgcgcatagcctagagcatttgccggcggtgcgggcgggtgccgcggtagggtgagacgtttcccgttttttcccgatatgcccggcggtccttcaattccttttgcatagagggtttaatgcgggagtcgatacaggatgtagcgcgccagacaccgagccagggaggcccctcgtgccatttctttctctctttcctccccgtgtttcttttccatgctccggccggcccggcgtagatatgcgcgtgcgttggattttattacatgtgagctgttgaaatcttacatgtgatctcgtagtgtgagtccatgcaacggaaatcatcagcccattatcagcgtgtctttcgccagcgcctgcgcgagcagggcctggtgaagaaggaagtctggatcttgccggagaacgccgcggcgctcgccggcatcgagcggatgctgcgtcgcccggctgccggagcggctcatttggagaaggaggaagacatgacggaagcccgggtatggaacgctcgctcgctggccgaggccctgagcggcaccgagctgttcagcagcggcgaggcccagatcgagctgatcgagggggcggaagcgagtctctatgtgatcatgcgcgaatacggcgacctgccggtgttcgtcgcgccccagggcgagcagatcatcgtcgaggcgctgctctggccggaaagcgatgttaccgacgcgaccgccttcaacgaagaggtcctgctcagccggcaactgttcccgctgtcgagcatcggcctgctcaacctgccgggcgaggagcgctgctacagcatgttcggcgcgttgagcacgacttcgtcgctggccagcgtgctgcacgaaatcgaaaccctggccggcaacgtgatccgcgccacggaagtctacgccggctacctgaaagcccgggcctgagggaggacaccatcatgacggtatggagcaagctgctgagcgccctgcgcggcggagccaacgaggttggcgaggcgatcgtcgacagccaggcgctgcgcatcctcgaccaggagatccgcgacgccgacgtcgaactgcgcaagtcgcgggaagcgctggcctcgatcatggcccgccaccgcctggcccaggagcgcgtcgagaagggcgcggcccaggtcgccgagtacgagcaatacgcgatcaaggcactggaggccggcaacgaggagctggcccgggaggtcgcggagaagatcgcgaccctggagaaccagctcgagggcgagcgtgcccaggtcgcggaattcgccgccagcgtagcccagttgcgcaagtcggtgagccaggccgagggcaacatccgccagctcaagcaacaggtggatacggtcaaggccaccgagagcgtgcagaaggcgcagatggccgttgcccagcgctacggcaactcgaagagcaagctgcagaccgcggtggactccctggagcggatcaagcagcgccaggccgaacgcgcggcgaccatggatgccgcggccgaactggccagcgcggcggcgccggacgatgcgctggacgccaagctgcgcgcggctgggatcaaggcctcgggcaacagcgtggatggcgtgctggcgcgcctgaaggaaaagggcaaggcctgataggcccgcggcccggcgaaggcgtccgggcccgtttttcagggatagagcgacaatggaaggtttcctgcagacggcgctgtcgttcccgaccgtgctgttcagctttcttctgatcctagcgatcatctactggggcatcgtcgccctgggcatggtcgagatcgatgtgctcgatctcgacgccgagtcggtcgtcgatggcgccggccaggccgaaggcctcgccgcgctgctggcgaagctgaaactcaacggcgtaccggtcaccctggtgctgaccctgctgtccttcttcgcctggttcctctgctacttcgtccagctgtggctgctcagcgcattgccgctcggctggctgcgctacccgttgggcgccgtggtggcggtgggcgcgctgttcctggcggcgccgctggcggccacgctgtgccggccgttgcggccgctgttccgcaagctggaaagcaccagcagcaagtcggtgctgggccaggtcgcggtggtgcgcagcgggcgggtcaccctgcaacatggcgaggcgttgctggaagacggcggcgccgggctgatcctgaaagttcgtgcggaagagaacaaaggcttcaagcgcggcgatcgcgtcgtgctgctggagtacctggaggcggagcacgcctatcgggtcgttaccgaggaagagttccgcggtatctgacccgggctcggtgagaatcaaggagaactgctgctatggatatgacgtcgctgatgcccctcctgctgggagtgggcctggtcgttctgctggtcgtgggcctgctggccctgttcaaggccttctacatcaaggtcccgcaaggcaccgcgctgatcgtcaacgacatgtcgtcgacgcccaaggtgcatttcaccggtgcgctggtctatccggtgatccacctgaaggagttcatgcgcatctcgctgatcaccctggaggtcgaccggcgcggcaaggacggcctgatctgccgcgacaacatgcgcgcggacatcaccgttgccttctacctgcgggtcaacgagacccaggacgacgtgctcaaggtggccaaggccatcggcgtcgaccgtgcttccgaccgttcggcggtgaacgagctgttcaatgccaagttctccgaggcgctgaagaccgtcggcaagcagttcgacttcgtccagctgttcgagaatcgccaggacttccgtgaccgcatcatcgaggtgatcggcaacgacctgaacggctacgtcctggaagacgtcgccatcgactacctggagcagaccgcgaagaactcgctggacccgagcaacatcctcgatgccgagggcatccgcaagatcaccgagctgaccgccacccagaacgtcatcaccaacgaactggagcgcaacgaagagctggcgatcaagaagaagaacgtcgagacccgcgaggcggccctggccctggagcgccagcaggctgacgccgaggcccggcagaagcgcgagatcgagaccatccgtgcccgcgaggaagcggaaaccgcgcgggtcaaggaagaggagcggctgaaggccgagcaggcgcggatccaggcgcagcaggaaatcgacgtgcgcaccgagaaccaccagcgcgaggtcgaggtggcgcagcagaaccgccagcgcgcggtggtcatcgaggtggagaaggtcacccgcgccaaggacctggagatcgtcgcccgcgagcgtgaggtggagctgcagaagatcgagaaggaaaaggcgctggaagagcagcgcaagaacatcgccaatgtgattcgcgagcgcgtcgcggtggaaaagaccgtggcccaggaggaggagcggatcaaggaggtgcgcgaggtttccgaggccgagcgggtcaagcaggtgatactgctgcaggcccaggcggaagccgagcaggagctggtacgccaggtcaagcaggcggaagccgacgaggcccgctccaagcacaaggcggtggaaatcaacaccatggcgcaggccgagctggaggcggcgtcgaagcaggccgaggcgaagaagcgtctggccgagggcatcgaggccgagcgcgcagcgccgggcctggccgatgcgcgggtgctggaagtcaccgccgcggcgaaggaaaaggatggcttggcagcggcgcgggtacgtgccgaacaactgatcgccgaagccaggggcgacgaagagcgcggcctggccgacgcccgggtgctcgaggcgcaggccgcggccaaggagaaggacggcctggccgaagccaaggtgctggccgagaagctcggcgcccaggcgcgcggcgaggagcagctcggcgcggccaaggccaaggccaccaaggaccagggcagcgcggaagcggaagtactgctgcagcgcctgaatgccgaggccgaggggcttggcaagaagttcggcgccctggatgccctcagcgacagcgctcgccagcacgaagagttccgcatgcagctggagaagagcttcgaggaggccatggcggccatcgccgcgaacaaggacatcgccaaggaccaggccgaggtgctcgccaccgcgctgggcaaggcgaacatcgagatcgtcggcggcgagggcgacttcttcaactccttcgccaagtcgctgtcggtgggcaaggccatcgaaggtgtggtcggcaagagcccggtggtgcaggacgtcctcgcccgcctgctcaacggccgtggcgcagccgctgcggtgatgccggaacgcaagagcggccacgagaacgagccggcggcggaagtctgagtcgacccgcagcctcctccgccaactgcggaggcgttccgcccgcgccctgagcggcgcagcccctggcgtggcctgttggctgcgcccggggcaggccgctcgggccggtttccatcgatgaccgccgtagacccaggaagaccaggatgtcggacactcaagccgcaactcccgcgcaggacgtattggacaaggccgttgccgagggcggcgcctacgaggtgctgcacaagcgcctgctggagcagggccagcgcctgcggcagaccgccgaaaggctcaacgccagtcgcctggaggagttcggcgacagccagatggatgtgatcggccgggtccgcatccgtaccgagaacaactgcatcgcccgcgatatcgtccaggtcggcgattgcctgctgttcggctacaacgtgttcatcggcctgcgcaaggaaaccggcgtggccgacgtattctccctctaccgcctggtggagggcagcgaaggctacgaggcggagcctgtgccactgggggacagctttctcgccgcgccgggcttcgtcaacgacttcaacgagctttacacctactacaagaacacccgcctgctgcaactggcgatccgcgacggcaagctgctggccagcttccagatcggcgagcggatcaccgacatccgcgtgttccgctggtcgatctccagcgacggcagcgaagtccgctacatcgacaaccgcggcgagcgcgacatcgccttgccggcaccgttcgacttcgaatggcagcgggctacccgcgagatggtggtggagggccgcttcccgcatctgaacatcctcgacaccctgttcgtcgagaccattggcggcgacctgaccatcaaggtcgagaacaacaccgaggtcggcctgggcatctatcgcgaagaggtgatggacaagacccagtcgctggacgacgcgcaggttgagttcgcccgcctcggcagcctgctgctgctcaaggtcctgccctatcgcgaggagcagtggcgctacctggtgttcaacagcctgaccggcaaggtcgagcgcatcgacgccatcggcctggcctgcatccagttgccggaggaccacgggatcatcttccccggcggctactacctgcagaacggcgagtaccgcaccttcgagcaatccatggaaggcatgcgcttcaagcgctcggtacgctcgcccaacggcgaggacgtgcagtacgttttctaccatcccgagcaggggcggaacgtgctgctcacctacaacctgatcaaccgccagttgcagaatccgctgttcggccacggctacgcgcgcctggaggacgggcgcatggtgatcttcgccgccgaaggcgaggaaccgacccgcatccatccgatgcaggtctggcagacgccgttctgcaccgaggagtacgcggcccgccaaccggcgcgtagcggttttctcgggcggatcggcaatgccgagctggtgcgcggcgtctccgacctctacgacctgtgccgggagatcgagaccccggcggtttcgatccagcgctactcgctgctgtgccagaacacccagcgcctgttcgacgtctaccactggctcggcagcgaccaactggacggcttggcgccgctgttgcgcgaagtggcggcgaccgccgagctggtgctcgacgagtacgagaaggtcgaaagtatccgccgccagtcggcccaggcgatggtcgacgcggaggagcggcacaaggcgctcctctccggcttgctgcccgacggctgggaccgggtgcagcagttcgtcgacgggctcaacggcatcaccgcccagcgtgggtcgctgctgaccatccgcgagtaccgctacatcgacgtggcgcgactcgacgccatggaggccgaactgctcgcggcccacgagcgggtggccgccgccaccgcgaccttcctcgccagcgaacaggccctgcagcccttgctggagcgcctgcagagcctcgatggcgaggcgcagaaagccgagaccgtggcccagctcggcgagccgctggcggccctggaggcgatggccggcgacctcgacatgctgtcctcgctgatggcttcgctgcgcatcgacgacgcgacccagcggacccgcatcatcgagtcgatctcggagatctacgcccgcctgaaccaggccaaggcgcgcgccgagcagcggcgcaagggactcggttcgagcgagaccgtggcccagttcggcgcccagttcaaactgtttggccagggcatcaccaacgccctggcccaggcccaggaccccgagcgctgcgacgagcaactgtcgcgcctgctggtgcaactggaggaactggaaagccagttcggcgaccatgagcagttcctcggcgacatcctggccaagcgcgaggagctgctggaaaccttcgaagcgcacaagcagaccctgctcgacgagcgccagcgcaaggcccagggactgctcgacgccgcccggcgaattctcgacagcctgcaacgacgcaccgcgcgcttcacccaggcggaggaactgaacgcgttcttcgccgccgacccgctgatcctcaagttgcgcgaactggccgaacgtcttcgcgaattgaaggacagcgtcaaggccgacgacgtcgaggcgcgcctgaaggccgcgcgcgaccaggcggtccgcgcattgcgcgacaagagcgagctgttcgaggagggcggcgacgtcatccgcctgggcccgcgccaccgcttcagcgtcaacacccaggaactcgacctgaccctgatgccgcgcggcgacgcgctgtacctgcacctgaccggcaccgatttcctcgaaccgctgcaggacccgcggctcgatgagttgcgcgagttctggcaggtgaacctggaatccgaatcggagacgctgtaccgcgccgaatatctcgccggcgaagtgctcgccgccgccgacgcgggccgcgatggcttcagcctggagcgcttgcaggcgctgctggcgcagccggacgagctggcgcgggcgatccgcgatttcgccgcaccgcgctacaaggagggctacgagaaaggcattcacgaccacgatgcggcggcgatcctggttcgcctgctgccgttgcgcgagagcgccggactgctacgctacgcaccctcggcgcgggccttcgccagcctgttctggagccgccggcgcgaggagcgggaagtcgccggctggcccgagcgggcacgcagcagccgcagcatccagcagatgttcggtcgtgacgacggcctgctcgcccttcgcggcgaagtggccgcggcgatgcgtgcgctgctcgccgaacagcccatcgcgctggacccgcagcatatcgacgaggcggccgagtacctggtctgggaattgtccgccgagcgtcccgaattcaccttcagcaaatatgcccggcaattgcaggaaggactcaagctgcgcctgcaaggcgcgcgtctatgggacgactaccggcagaccctggagcgtctcggcgagcggcccgccgcccagtgggaactggccggcaactggctgcgcggactatgtggcgacgccgagttccagccgctggcggcctacctggacgaggcggtggcgctctcgttgctggacgaggagatgccacgacggatcaccgaggtcgacctgcgcttccaggtcgacggcctgatgggcgagcatccgcgcatcgtcgaacgcggcctggcgctggcggtggacgacttcttcggccgcctgcgtcgccatcgccagcagttcctgccggggctgcggcgctaccaggcgctgcgccaggagatcgtcgaacgcgagcgcgaggcattgcgcctggccgagttcaagccgcgaccgctgtcctcgttcgttcgcaacaagctgatcaatgacgtctacctgggtgtcatcggcgacaacctggccaagcagatggggacggtgggcgagaacaagcgcaccgacctgatgggcctgctgatgctgatctccccgccaggctacggcaagaccaccctgatggagtacgtggcgcatcgcttggggctgatcttcatgaagatcaacggtcctgccctcggccacgaggtgcgctcgctcgaccccgggcaggcgccggacgcgacttcgcggcaggaactggagaagctcaacctggcgctggagatgggcaacaacgtgatgctctatgtcgacgacatccagcacacccatccggagttcctgcagaagttcatctccctctgcgacggcacgcgccgggtggaaggggtgtggaagggccggaccaagacctacgacatgcgtgggcggaagttctgcgtggtgatggcgggcaacccctacaccgagtccggcgaggtcttccgcattcccgacatgctcgccaaccgcgccgacatctacaacctcggcgacaccctcagcggcatgcaggaggcgttctccctcagctacatcgagaacgccctgacctccaacccggttctcgcgccgctggccacccgcgacatggccgacgtctatcgcttcgtcgccaaggccgagggcaagccgttctccagcaacgagctggcccacggctacagcggtgccgagatcaacgagatcagcagcaccctgcaacgcctcatgcaggtgcgcgacgtggtgctcaaggtcaaccagcagtacatcgccagcgccgcccaggccgaccagtaccgcagcgagccgccgttcaagctgcagggcagctaccgcaacatgaacaagatggcggagaagatctccgcggtgatgaacgatgccgagctgctgcaactgatcgccgaccactaccagggcgagtcgcaactgctgaccaccggagccgaggagaacctgctgaagctcgccgaactgcgcggcaaccagagccccgagcaggccgagcgctgggcgcagatcaagcgtgacttcctgcgcaacaagtccatgggcggcagcgacgccgacgtcggcggacggctggttgcgcagctcaacgaccttgtggaaagcgtccgtggcctggctcgcgaaccccagccggtacaaccggcgccctgggacgagttgttggctggattgcgccagctcggccagggtgcgccggcgctgaacgtcgaggtgacggcgcctgcgcagccgggcgtgcagcaggtgctggagagccttgccgcctgcctgcaggacagtttcctgccgctgatcaaggtgatggaccgcaagatcgacgtcgacctgcgcacgcacaaccgcatcaacgagatatccagccgcctcgacgaactgggccggttgctgggcggcgagcagaggccgctggagaacgatcaaccctgaggacacgaggagcgggaaatggacttcgacggattggaccgccagctgcgcgacagcctggccgatctgaagctgagcaacgaggagcgggacgaactgcgccaactgggcagcgagctggcacccgaccaggtgcgtttcctgcgcaaccgtgccttcgacctggtgcgtgagctggtcctcctggaggagcagggcgaacggatagccgccctgaagtggctggagcaggtggtgcgcaccctggaggttaccgcggcgccgccgcgcagccgcgccagcgcctatttcagtcccggcgaggagtgtcggcggaagatccgcgaactgtgccggcaggccaggcagagcctggacatctgcgtgttcaccatctccgacgaccagctcagtgcggaaatcctggcctgccatcggcgcggcgttccggtgcggatcatcagcgacgatgacaagcagttcgacgaaggcagcgacatccatgcgctgcgcgaggccggcgtaccgctgcgaatcgacgacagtcccttccacatgcaccacaagttcgccctggtggatggcgcctggctgctcaacggcagtttcaactggacccgcagcgccagcgtcaacaacgaagagaacctgctggtaaccgacgacgccgtgctgatcggcgcctatcggcgcgagttcgaggaactctggggccgctacgccccgcgctgagcggcagcgacgcgagaaaggcagggcaggcggtcggccggcggaccgcacgcgggcgggtttcaggttagacttgcgccctttcgcttcccacgccggtattcccatggccctgcaatccacgccctataaagccgatatttccctcaccgacctggaccgcggggtctacgagacgttgcgcctgaccgtggcccggcacccctccgagaccgaggagcgcctggccgtgcgcttgctggcctacgtgctgtggtacggcgagcagatcgccttcgggcgtggcctgtcggacgtggacgaaccggcgctctgggaaaagagcctggacggccgggtcctgcactggatcgaagtcggccagccggacgccgagcgcatcacctggtgctcgcgtcgctgcgagcgcttcagcctgctcgcctatggcaacctgcgggtctggcagaccaaggtgctggacagcgtgcgcagcctgaagaacatcaacgtcgcggcagtgccccaggaacccctggagagcctgtcccgcgacctgccgcgttcgatcaactggaccgtgatgatcagcgagggcaccctgttcgtcaccgacgagaacggccagcacgagttgcagctggagtggctgcagggcgagcgttgatcgccgccgccgtttccttccgtcgagccgaacgagtgacctgatgcgtatcgaaccccgccccctgcccgaaaccctgcccgatctcggcgaccttccgccattgctggcgcgcctgtacgcggctcgtggcgtgcgttgcgccgaggagctggacaagggcctggcgcggctgattccctaccagcggctgaaaggcatcgaggagggcgtggcgctgctggtggacgccctggagggcggccagcggattctcatcgtcggcgacttcgacgccgacggcgccaccgccagcagcgtcggcgtgctggccctgcgcatgctcggcgcggcctgggtcgattacctggtgccgaaccgcttcgagtacggctacggcctgaccccggagatcgtcggcgtggccctggagaagcgtcccgacctgctggtgacggtggacaacggcatctccagcgtggacggcgtccaggcggcgaaagccgcggggctcaaggtgctggtcaccgaccaccacctgcctggcccggaactgccggcggcggatgcgatcatcaaccccaaccagccgggctgcgaattccccagcaaggccatggccggggtcggggtgatcttctatgtgatgctggcgttgcgggcgcgcctgcgcgagctggactggttcgcccggcgcgggctgaaggaaccgaacctcgccgagctgctcgacctggtggcgctgggcagcgtcgccgatgtggtgccgctcgatgccaacaaccgcatcctggtccaccagggcctcgcgcgcatccgcgccggccgcgcccggccgggcttgcgcgcgctgctggaggtggccgggcggcctccggtacggatcacctccaccgacctggggttcatcctcggtccgcgcctgaacgcggcgggtcggctcgacgacatgtccctcggcatcgaatgcctgctctgcgacgacgaagcgctggcccgcgacatggcggtgcagctcgaccagttgaaccaggaccgcaaggccatcgagcagggtatgcagcgcgaggcgctggcgcagctcaaggagctgagcctggagcaactgccgttcggcttgtgcctgttcgacgccgactggcaccagggcgtgatcggaatcctcgcctcgcgcctgaaggagcgttaccaccggccgaccatcgccttcgccgatgccggcgacggcagcctgaaaggctcggcacggtcgattcccggcttccacatccgcgacgcgctggacgcggtagccgcccgtcatcccgggctgatcagcaagttcggcggccacgcgatggctgccggactatcgttgccgcaggaaaacttcggcgctttctccgccgccttcgatgccgaagtacgccgccaactggccgaggaggacctggccgggcgcctgctctccgatggccagttgagcatccaggagttccacctggagctggcgcgcgcgttgcgccaggccggtccctggggccagcactttcccgagccgatgttccacggggtgttccagctggtgcagcagcggatcgtcggcgagcgtcacctgaagctggtgctgaaaagcgaatgcggctcgctgcaactggatggcattgccttcaacatcgaccgcgagcagtggcccaaccctaccgtgcgctgggccgagctggcctacaagctcgacgtcaacgaattccgcggccaggaaagcgtgcaactgatgatcgtccacatggcccctcgctgagcgcgtcccggagctgggggcaacctagctgccacctgcttttctgctagctattccagcgaaaacatacagatttccggcgaaatcaaggctacctgccagttctggcaggtttggccgcgggttctttttggtacacgaaagcaccgtcgaaaacgggaccgagccaggggagtgcagttccttctacccgaaggactgatacggctgttccgatcagcccacaaggcggcggtaagcgtcggccgagtacttcggcctgaaaaaaccaggagaactgaacaagatgaagaaggtttctacgcttgacctgttgttcgttgcgatcatgggtgtttcgccggccgcttttgccgccgacctgatcgacgtgtccaaactccccagcaaggctgcccagggcgcgcccggcccggtcaccttgcaagccgcggtcggcgctggcggtgccgacgaactgaaagcgatccgcagcacgaccctgcccaacggcaagcaggtcacccgctacgagcaattccacaacggcgtacgggtggtcggcgaagccatcaccgaagtcaagggtcccggcaagagcgtggcggcgcagcgcagcggccatttcgtcgccaacatcgctgccgacctgccgggcagcaccaccgcggcggtatccgccgagcaggtgctggcccaggccaagagcctgaaggcccagggccgcaagaccgagaatgacaaagtggaactggtgatccgcctgggcgagaacaacatcgcccaactggtctacaacgtctcctacctgattcccggcgagggactgtcgcggccgcatttcgtcatcgacgccaagaccggcgaagtgctcgatcagtgggaaggcctggcccacgccgaggcgggcggccccggcggcaaccagaagatcggcaagtacacctacggtagcgactacggtccgctgatcgtcaacgaccgctgcgagatggacgacggcaacgtcatcaccgtcgacatgaacagcagcaccgacgacagcaagaccacgccgttccgcttcgcctgcccgaccaacacctacaagcaggtcaacggcgcctattcgccgctgaacgacgcgcatttcttcggcggcgtggtgttcaaactgtaccgggactggttcggcaccagcccgctgacccacaagctgtacatgaaggtgcactacgggcgcagcgtggagaacgcctactgggacggcacggcgatgctcttcggcgacggcgccaccatgttctatccgctggtgtcgctggacgtggcggcccacgaggtcagccacggcttcaccgagcagaactccgggctgatctaccgcgggcaatcaggcggaatgaacgaagcgttctccgacatggccggcgaggctgccgagttctatatgcgcggcaagaacgacttcctgatcggctacgacatcaagaagggcagcggtgcgctgcgctacatggaccagcccagccgcgacgggcgatccatcgacaacgcgtcgcagtactacaacggcatcgacgtgcaccactccagcggcgtgtacaaccgtgcgttctacctgttggccaattcgccgggctgggatacccgcaaggccttcgaggtgttcgtcgacgccaaccgctactactggaccgccaccagcaactacaacagcggcgcctgcggggtgattcgctcggcgcagaaccgcaactactcggcggctgacgtcacccgggcgttcagcaccgtcggcgtgacctgcccgagcgcgttgtaagctcggtggccccggccggcactccaggaaggaatgccggtcggggtcgctcaagccgtcttccgccaggagggcggctgctttatgtcgcttgggccgttggcctccgcgaacccggtctaaagttcaggtgtgagctttattccaagaccgaccgggagtcctgccatgagtctgctgttcgagcctcttagcctgcgtcaaatcaccttgcccaaccgcatcgccgtatcgcccatgtgccagtactcggcgcaggagggcctggccaacgactggcatctcgtgcacctgggcagccgcgcggtgggcggcgccggcctggtgatagtcgaagccaccgcggtgttgcccgaggggcgcatcaccgctgacgacctcggcatctggagcgacgcgcatgtcgagccgttgcatcgcatcacccgtttcatcgagtcccagggcgcggtcgccggggtccagctggcccacgccgggcgcaaggcgagtacctggcggccgtggctgggcaagcacggcagcgtgccgatcggcgacggcggctggataccggtggcgccgtcggcgatcccgttcgatccccagcacacgacccccgaggccctgagcgaggcgcagatcgaggcgctggtgcaggccttcgtacgcgccgccgagcgctccctggctgccggcttcaaggtcgcggaggtgcatgcggcccacggctacctgttgcatcagttcctctcgccgctgtcgaaccagcgtcgcgaccagtacggcggctgcttcgagaaccgcatccgcctgcttctgcaggtcaccgccgcggtgcgcaaggcctggccgcaagagttgccgctattcgtgcggctgtccgccaccgactgggtggaggatggctggaaccccgacgagaccgtggaactggcccggcacctgaaggacctgggcgtggacctgatcgacgtgtcttccggcggtaccgcggcgaatgcggaaatcccggtaggaccgggctaccagaccgagttcgccgaacgggtgaagaaggaggccggcatcgccagcggcacggtgggcatgatcaccgagcctgtgcaggccgagcatatcctgcgcaccggtcaggccgacctgatcctgcttgcccgtgaactgctgcgcgatccgtactggccgttgcacgccgccgacgaactgcgcaacgagcagatgccctggccgccgcagtacctgcgagccgctcatcgcagcacgccgccgcgcaaatccctggaaatgcagtgagccgtcggggccgtcggcgcggcgaggcgctggcggcccacctgatggaaacctttgccgaccttggcggtctgcctggcatcaggaaatcaacctgggcgtttcatgggagatattgcgtaatggcaatatgatgttattctcccgcgacgttcgctccggaccgcacttcgagaaaggatgctcgcatgcacgccaacgccggttctccccacgcctccctgcctgacagcgatgtcgccctgctggccaatatcctggtcctggcgacacgcaacatgaacaacatgaccaccatgctggcgcacctttcggtggagctcagccagagcgaagagccacgcctgcaacgggtcggtcatcgggtcctgaacgaactctcggagctgggggccgccctggagacccagtgggacctgatcggcgcgctggcgcgtttctcacccctgctcgaacgtaccctgccgcgccaggaacccctggtcaccgagatccacctcaccgaactgccgggccaggcgctgccgccctccgcctgaacggcgcgtcgctcagccctgcgcggggctctgcgacaggtgttccaggtagcaggcgatgatgtccaccgacagcttgaggcgggtttccagcagcgtcatggtcggctggaagtcggccacgctgagggccttgaggaacaggtcggccttgagcatctcgagaaactggcaggccaccgcgtagagcgtttcctcgtccatgtggggagcgaccgcggccagtcgctcgctgagcagcagatagctctgctgcggcccctgctcgtagaaggacttgccgatcgccggaaaccgcggggattccgccaccaccaggcgatagaggctctggcagcggggatcgagcaggctggtgagaaagcgccggccgaaatgctcgagggtggcgctcagcgtggcggcggggcgcggctgatcggcgctgtcgtcgaagatttcctcgatcatgtgggcgatcaccgcggcgaacaggccctccttgccgccgaaggagctgtacagggtcccccgtgaaccaccggcccgttctatcaccatgtccagggtggtgccttcgaaaccgtgttcgagaaaggcctgggtagcggcgtcgagcatggcgcggcggcgttgcctgccgcgttcggtcagacggggagaagcatcgttcatgagcggtatcgggcctcgcggggtggcggtcggaaggtgcgcatggtgggccgtcgggacggtccgttcaagcctccaggcggtttgctgagagcgtttctcgttagggttgacgctggtcatttaagaactgtatcgtacagtactgttttggcaagcacttccgctcattcctccgccttgcctccccgcaggagtccccccatgaatgcccccgctaagagcctgttggatatcgatgcctttcccttggtccaggtccgcgagatgccccgcgagctggccgatgtcgagcgctggttggaggaggtcgaggcgctgctggccgtcgagcgcgatttcgccctggtctatccgccgctcccgcaggaaacagctgaaggcgaccagcaggcgcgcaagcgcctggtgttgtggctcaaggaaaatcgccagcgcttcgtcgagcattgccggggcatcctgctcagtgccaacggccagccggacaacctcgccgacctgcagcaactggcgccggtgctgcaggctgtctacggcccgccggtgagcgtggcgccggacctggcgtccgcccgcggcatggcgaaggcactgctgagcgggccggcgacggggatgaactggtgacgccgccatgtccctgaacactccgcgcaacaaaccgtcccgcaccgagaccgaagctgtcgctgccagctcgggacgatccgccgtcggccggcgggattacaccgagcagctgcgccgggcagcccggcgcaatgcctgggacctctacggcgagcacttctactgagcgggcgtgccggattgccattggtgcgggcgatggaacacatcgtttgattcctgggctctttacctcaagttaacttgagctatcagaatccgcgcagagcgtctggcgatcttgccgggcgccactccatgcccggaggcaacgatggatagcccgtccactctcgctcgtccgcacccccaggccagcccgcgatggctggcagttgccaatgtgatcttcgccggcatcgccgctgccctgcatgtcggcaaggcgaccatcgccctgccgtcgctgcaacggagcttcggcggcgacctcgccgcgctgagctggatcatgtccgcctttccgttcgtcggcgtattcggcggcatcgccgccggcctcctggtgcgtcgttggggagatcgccggctgctgaccgttgggctggcgattctcggcggggcgagcctgctcggtgcgtcgatgcaggacttcgcctggttgcttgccactcgcttcgtcgaggggctcggtttcctcatcgtggtagtggcggcgcccgccgtgttgcacaggatcaccagcgagacgcggcgcagcgtggtgttcggtctgtggagcaccttcatggcaggcggaatcgccctctcgatgctgttcgggccgctgctcgcggactggcgtgccgactggcaactgagcgcactgctggtactggtcgcggcgctgctgctgccgctcagcgtccctgccgacgatgggtgcagggcggcaggcgtgaggccggccggtcttggcacgttgctcaaggttccggcgatcaccctgctggcgctcggcttcaccacctacaacctgcagttcttcgccctgatgacgttcctccccgtgttcctcatgcagcgcctgggcgtcgccctggagactgcgggactcatcggcgcggccatcgtcgcggcgaacgccctgggcaatgtcgcggcgggcttcatcctttcccgcggcatacgtcccggcgccttgctggcgagcaccgcgatcctgatgggactcaccggtgcggcgttcttccatgccgcgacgccgggactcctggcgattgcgctggggttcgtcttctcggcggtcgccggcatgctccccaccaccgtgctggcgaccgcgccgctggcctcgcccgcgccttcgctgacgccactggccatcggctgggtaatgcagggcaactacctggggcaggtgatcggccccttgctgatcggcctgatcgtcagccgtttcgactggtcgggcgcgatcggcctgatgctggtcgcgggcgcggcgggggccgtcctggggttctgcctgctgcgtgcgctggacggcctgcctcgcgccattgccacgggtcccgcggctcgccccgcggattagaagagaaaccggcttcgtgcagggcgggtagccgagcgactattcgtcctgcgcattggttcggcacgggcggccagaggccgccgccgtccctcggctcagtcgtcgcgggtgagcacttccagcagttcgatctcgaacagcaggttggagtggggcttgatgtgcgcgccgacctgccgttcgccgtaggccaggtgggaagggacgaacagccgtcgcttgccaccgaccttcatgcccatcaggccctggtcccaacccttgatcactcgtccggtgccgatcacgcactggaatggccggccgcgctcgtaggaggagtcgaacagcgtgccgtcttccagggtgcccttgtactgggtggtgatcagcgcacccttcactacctccttgccgtcgcccaggaggaggtcttcgatctgcagtcggtcgttcatggggcggtacctgcgcggtttgcggaaagccgcgattctgccagcaagcgcgccgcctgtcgccgagccgacggatcagggcattgccaggcggtccgcggcacgggcatcatgcccgcgcctttccgtcgggaaggctaccgcgttccgcgatgtcgcgcgcatcgcggctggacacatatctcagggatcatacgagaacatatccgcatgcaaagactgtcgcgtatcggccgcaacaccctcgccgtctccgtttccaccttgctcctcagcgcctgcaaccagggcgacgatgcgccgaagcctgcggcggtcgcgccgcaaccggccgcaccgagcatggctgcactgagcatcccgctatgcctcaacggccagtgcgcggtgatcgaccaggacgccaagctgctcgtgccgttcgacaacgactacgacaatatcgtcgccagcgcctaccagggcaccctgatggcggcgcgcgaggagcgctggaacctgatccaggcgaaggacggcaaggtgttgcgcgacgatatcggcgaagccctgtcgctgctcacccccaacctctatggcttcgtccgcgatggcaagtacggcgtggtcgacggccagggcaaggaagtccaggcgccgcgtttcgacgacatctaccccaacagtgccaacgaattcatcatctacgagatcgatggcaagcgcggcatcctcgatgccaagggcaagcagctcaccgaggcgctctacgacaccaccctggtcaacggcagcgtcgccgaacacggcggcttgatcagcgccgagcgtggcgaggagaagtggatcatcaacctcgctaccggcgaacagaaggccgtggcctacgagagcctgggcgacctccacgacggcgtgatgagcgccagcgtcatcggcaagggctcccaactggtggatgccaagggcgacgtggtcggtgacggcaagagctacgattacctgggcaccccggccaacggcctggtcgcgttccgcgagaagtacgacagcccctgtggctacctcgactaccagggcaaggtggcgatcgccgcccagttcgccggttgcggcgccttcggcaagcagggcgggctggcccagcagcgcatggaagatggctcgtcgggcaagtacggcctgatcgatcgcagcggcgcctggaaggtgcagccgcagtacgattcggccgacagcgccggcctcaccgcgcttggctacaccgtcgacgtgcccggcctggctgccgtcggcgtgagcaccggcctgttcagcgccgacttcggcatcttcaacctcgacgaaggcagcgagtgggtgaagccgggttatgcgcagatcggcgcgctgggcaacgacctgttcgtcgtggcgaagaagggcgggccgcagaagaccgtcagcttcatgggttcggaaagccaggtgccggtggtgggcctgatggaccgcagcggcaagatgctgctggagccgggcgaactgatcagcatccagtctgcgtatgacggtcgtttcctggaaggtctcgacggtatggacaacgctgcccacaccgtgttgctcgatcgccagggacgcacgctggttccagcgctctggcagaagctggaggtgaatccgcagcagggttacatcctgggctacgaagtcagcggcactggcgacgaggcgacggaaaccttgcgcgcactgtacgacctgaacggcaagccgcgcttcaccgtggccaccaccgattgcggcgccgaacagttgctcgacggcaatggcaaggcgatctggccgcaggacccgaccccgtattgccagttggacgacgagcaggacgacgaaggcgagccggagcaggagccggcgcccgtcgaagagagcgaggaaaccagcgagagctgagttccccgggcgcgtccgtcccttgcggcgggcgcgcggttccgctgtttcgccgtggctgctggccacggtctcccctcactggcggtgccagaagtccgaatactcctcgaacgggtagcgctcgccgtcatagcgcagcgtgcgcttcaccgtgcgcaagggtttgccgttctccgtttcgccgtcgctgacccgcgaggtgatgaccaggtcggcaaagccgttggagcgtccgcggccgagttccagggtcaggtgcgagacttcctgttcgaacccgggctcggcggagcagaccgagcctttcagcgtcctccactggtccaggtaggtattgagcaccggccgcagcttgccttcgccggccggcaccaccagggtcagcaggttgtcgaagccggcttccggacaactggcgccacgcgccacgctatggaataccacgccgaaggcgcgcaccgtcgggctcaggcgatagcgcgcggtgtccagccagaggctgtcgctgccgacggcgacggaggcgtcttcttcgaagtcgctgtcgtagcgttcgagcagcctgccgctgcggctgtcggccttggccaatagcagatgcgggtggcgttcgccttccacggcggtgtcgcccggatccaggtaggccatggcgatcaccgtctgcgcggggtcgtccggccagggcttgcaggccacggcgaggaacggaccggaagattcgtacgaaggggctatccagccatcgtggccgacctgcctggctacggcgtcaagcagtcgcgacgcgcagggctgcggttcgcgggcttcggcctggctggcgagtcccagcagcaggaggcagagtcgggcggagaggcggcggttacggtccatgtgaaaagagtcctttggtggaggcgggcacggaagacgcccggcgctgcgggacattctagcggctgcgcggaccttgcgaagcgggctggcggggcggacatatcgcggccgcgctgctcaggccaggccgttttcccggatgtagataaagagtccggcattgctgtccaggccaagcttgcgcatggcgctgctcttttgcgcgctgatggtctgcttgctgcggcacagtcggatggcgatttccccgaccgccaggccgctgccgtacaggcgcagcacttccacttcgcacggggtgagttgttcgaggctggccagcggcttgccgtgctcggcttcgcccacttccagcaggtgtgcgatggagcgcgagatgaatggtcgacggccggcgtggcggatcgccttgggcagatcgtcgagcatgccgcgtttgctcaccaggccgtgaatgcccagcttgagcagggatgaaacgagtgccgggttgccgagcatggtgacgacgatgatcggcaggtccggatagcgccgccggaccttctgcaccaggcgcaagccgtcggcctgcaggctgccgggcatcatcaggtcggtgatcagcaggtcgcaggggtgcgcttcgagctgcgccagcaagccatcggcgtcctgggcctgggcgacgatccgcaggtcgtcgtacgcactcagcagatagcgcatgccgatcagggtgagggcgtggtcgtcgacgaggatgacgcgtgttttcatgaaatcgaacccgatcgaggtggaggtttccgcagcggctaccggcaacgccggcaggcggataatccgccaggaggcagctccggacgggctcgaattctagcgatggtgtctgtcggtttaatcaggacttttctgaatgctagtaggaaatttcctatgtgttttccctaggttatttcgaggggaggccgagaaacatagggtctttgaacggctttcgtggagtaggggttgaaatcgctgtcagtacatttctgtcagtcttgctggacatcggaagggcgcgacggcagcgcgggttccgctgccgtcgccgtccttcaacccagttcgcggactgcccgcaccgcctggtcgatggcggcatgggcgtaggcatcccaggccgcatccgagttggcgatggcgacattgccgaccttgcttcgcgccagttccatcagcgcttcgctttccgcctcgtcgtcgtagagggtattcatgaagtaggagtagccgtgcgaccagcggttcacggtgatgccggtgatgtcgcggcggtggtcgaagcccgccgggccgagcatggcctggagctggtcgcggatgtccttctccagttgctcgaagctcatcgcgtagagcttgctgcggcctacgcgagcctgggtgcgggcgtccatgccggcgttcggggtggtcggcacgtagaccatgtgcacgccgatcggctgccgcgggtcgcgtggatgccggtagctgccgaggtcgaccgggaagtccagcttgatccgcgagtagggcagggtcggcgcgtagatctcgtggatgccgagggtcttccaggcctgccagttgcgcagcaataccttggtgtacaccagcgggaacttgacgttctggctcagcgcgtgggcctgctcctcggagaggtcgcgcagcaggtacggcaccatcatgttgtagcaggccatcacgcagtgcttgccgtgtacccggtgcaggcggccggcgcggctgtagccgacatcgacgccgccggcgcggttgcgcacgctgacggcggtgctgttcaggcgcaggcgcaccgggtgcccggcgtggtccagcttcgagtagtcgaagcgggccatgacgatgtcctccatgcctcggcccggcgccaccgcggggatcaggtcgcgcaccatgagccgagccagcgaggcgttgccgtcggggaaatggtagatgtacggctcgtccatttccgcctgggcctcctcgctgggttgcggcaggccgagggcgtcgaagccggggaagccggcggcgtatgcgtcggccgccggcagggcgtcggcgccgagggcagagaagtcgttgctgcggccctggaagtacttcaccgaggtttccgagagcccgacgttcttgagcaggtagtcgcggtagctggtcttcgccaggtaggtttccttctcttccacgctcttgccggcaagatagtcgcgaggtgactcgtacagcgcgatgagcgcctcccggtcttcgcggctcagcgggaagtcgccgatgaaggcgcgccaggagcgggcattgagacgatcgcgggggacctcgtcggcaaccatcggcgtcgggtcgccgctgaccagcttgtccacgccgaagctggccttgtcgaagaacaccgcgcgggacaggcccaggccggggtagaagtcggtgtcgaaggctgtctcgaagcgcttgagctcgacgcccaggcgtttcagcaggtgtttggcgtcttcgctatagagggcgttcggcgattgcagcgactcgctgccgccgtagccgaggatagtgcgcccgccggcctggaattcgttgcgcttggcatggccgccgaagtcgtcgtggttctcgatgaccaggatgcgcgccgcggggtgccgttcgcgatagaaccaggcggcggcgaggccgctgatgccgccgccgaccaccaccaggtcgtattcctcttcgatcggcaggtggtcgacatcgaaggtcttcttctcccagcccatctggtgtgcgacttcgaaggcgcccggatggctaccgcgcaggccggtgagcgcgggcggatagtagcggccgccgggggcggcgcggaggatctcggcgggggtcaggcctgcggcgatggtcagggctacgccgttcaggaagtcgcggcgggagatggtcatgggaagtcctttgcgaggcagtgggtggctcgggggagccatgttcacagattgctgttgcgaatgcgcgcggagcggctggcgtcggacgccgacccgcagtcgcgggcgggcgcggagtttagagggccatgccggcgcgtcgaagggctttctgctggcactaggcctctatctggagaaatgtgacatgtgtcgcgctttgccacggtgtccggggaggccggcaatatctcgaagcaaactcccggcgggcagcgcggacgcgaagggctagagtcggtcgaatccggttgttaccgaacgtcctggaggttcctcatgaatacccgtggtttgctcgaccaattgctcaagtccgggcaggaaatgttgcagaacaagtccggcggcaagcccggcgccagcggcggcggacagctcggcagcctgctttccggcgccggcggcggagccctggcggccggcgccatcggcctgctgctgggaaacaagaaggcgcgcaagttcggcggcaaggcgatcacctacggcggcctcgccgcgctcggggtgatcgcctacaaggcctacaacaactggcagcagcaacagaacggcgccgcgccgcaggcgcagccgcagaccgtcgaccgcctgccggaagcccaggccgaagtgcatagccacgcgatcctccaggccatcgtcggtgcggccaaggccgacggccacatcgacgagcgcgaacggcagatgatcgaaggcgaggtggccaagctgaccagcgaccgcgaggtgcagggctggctggagcgcgagctgaacaagccgctggacccggccgagatcgcccgtgccgcgagcaccccggagatcgccgcggagatgtacctggccagcctgctgatggtcgacgaggaaagcttcatggagcgctcctacctcgaggagctggcgcggcagctgcgcctggagccctcgttcaagctggagctggagaaccaggccagacaggcgctgcaacgcctggcctgagacggcgaagtgtcgttccgcggataaccgccgccatcagggcggcggcgttgccgaagggccgagcagaacctctcgctcgcgctggcacagctccagcaggaagtcccagaccacccgcaggcgcaccgagcggtgcagctcccgccgggtgctcatccagtactcgcgttggatgctttcctcgggcagcaccggtaccagcaacggatcgcggctacccatgaagtgcggcaggatcgccaggccgatgccggcctgtgccgcctgctgctgggcgaccacgctggtgctgcggaacacgacctgcgggtggcggcagaaactgtggtggaacatcagttcctggctgaacagcaggtcgtcgacgtagccgatccactggtgcctgccgaggtcgtcgcggtcgcgcagcggcggcgcctgttccaggtaggcggggctggcgaacaacgccaggcgatagcgggtcaacaggcgggtgatcaccaggtcggcgctcggccggtcgagggagatggcgatgtccgcttcgcggttggtgatgctgacgaagcgcggcaccgagaccagctcgacctccaggcccgggtagtggcgcatcaattgcgccaggcgcggagcgaggaagacgctgccgaggccttcggtgacgccgatgcggatctgccccagcggcgagatgctctggctcatttcttcctgggcgagcagcgcggtgttctccatcgcctcggcgtgcttgagcagcgcctggccggccggagtcaactggtagccgccggtgtgctgggcgaacagttgggtgccgaggtcgcgctcgatgttctcgatgtgccgggccaccgtggcgtgagtggtgccgagacgcttggcggcggtcagcaggcgaccgctgcgctgcaactcgaggaagaaacgcaggtcattccagtcgaacatggggagcgccttctgccgggccgagggggggggctgttagaaaacgaacaatagctgccccgaaacgtttgtttttttatcgcgaatgaacgactagcctcaagccgttcgagacttgccggtcatccgcaggtccgacggcccatcacaagaacgacaagacgaggctcgccatgcccgaggtactggatacctacgactacctcatcgttggcgccggacctgccggctgcctgctggccaaccggctttccgccgaccctgccaaccgtgtcctgctgctggaagccggcggcccggacaactatccctggatccacattcccgtcggctacctctactgcatcggcaacccgcgtaccgactggtgcttcgacaccgacgaggtccccgggctcaacggtcgttccctgaagtacccgcgcggcaaggtgctcggaggatgctcctcgatcaatggcatgatctacatgcgtggccaggcccgcgactacgaccagtgggtggccgaaggcaatccgggctggagctggagagagctgctgccgctgttccgcaggatggaggaccatttcgccgggaccagcgaaatgcacggcgccggcggcgaatggcgggtagaacgccagcggctctcctggaagctgctcgatgccttccagcaggcggcggcgcagaccggcatcgccagcgtcgaggatttcaacggtggcgacaacgaaggctgcggctacttccaggtcaaccagcgcggcggggtgcgctggaatgcctcgaaaggcttcctgcgcggcatcgcccagcgcgccaacctgacggttctgacccatgccgaagtccagcgagtgctcctcgaggacggccgcgccagggccctgtcggtctgttggcagggccgcgagcagcgcttcgaggcgcgccgcgagatcgtcctgagcgccggcgcgatcggttcgccgtgcctgctgcaacgctccgggatcggcccgcgggacctgctggagcggctcggcgccggcgtcgtccacgagttgcccggggtcggtggcaatctccaggatcacctgcagctgcgcatgatctacaaggtcgacggcgttcccaccctcaaccagatcgccggcagcctatggggcaagctgggcatgggcctgcgctacctggcgagccgcagcgggccgttgtcgatggcgccgagccaactgggcgccttcgcccgctccgatccgcagcagccctcggccaacctcgaataccacgtccagccgctctcgctggatcgcttcggcgagccgctgcatgccttccctgcgttcaccgcgtcggtctgcgacctgcgtccgcacagccggggaacggtgcgcatccgctcgctcgacccgggcgaggcgccgtcgatccagcccaactacctgagcgatccgcgcgacctgaaggtcgccgccgacgccatacgcctgacccgccgcatcgccgccgcaccggcgctggccgccttccgtccgcaggaatacaagcccggcccggaataccgcagcgaagaggatctgcagcgcgctgcggcggagatcggcaccaccatcttccaccctgccggcacctgccgcatgggccaggggccgcaagcggtggtggatgcgcaattgagggtgcacggaatccccggcctgcgcatcgccgatgcctcgatcatgcccagcctgacctccggcaacacctgttcgccggtgctggtgatcgccgagaaggcggcgcagatgattctcgccgagcgccgccgcgaggccgcgccgcaggtcgtcgaaagcgccatggcggccggcggcaaggaggcggtggaggcctgaggatcgctacaccccgtatcgcgtggcgcccggcgccgcagcggtcgacgctgaaaacggaaatggcagacaacaataagagcccccacaaggggcgggagagccgcaatgaccgagtacgcaacgaccccttcctacacagtgcctgcgaccacgccccaggaggagcgcaaggtgatcttcgcctcctcgctgggcacggtcttcgagtggtacgacttcttcctctacggcgccctggcggcggtgatcagcaagcagttcttcgccggcgtcaacgacaccacggccttcatcttcgccctgatggccttcgccgccggcttcctggtgcggcccttcggcgcgctggtgttcggccgcctgggcgacatgatcgggcgcaagtacaccttcctggtgaccatcctgttgatggggttgtcgaccttcgctgtcggcctgctgcccacctatgcctcgatcggggtcgccgcgccgatcatcctggtcaccttgcgcatgctccagggcctggccctgggcggcgagtacggcggcgcggcgatctatgtcgccgagcacgccccggcgaacaagcgcggtagctacaccagttggatccagtccaccgcgaccctcggcctgttgctctcgctgctggtgatcctggcctgtcgccagttgaccggcgacgagttcgagacctggggctggcgcctgccattcctgctgtccatcgtcctgctgggcatctccacctggatccgcctgtccatgcgcgagtcgccggcgttcctcaagatgaaggccgagggcaaggtcagcaaggcgccgctgcgcgagtccttcacccagtggggcaacctgaaggtggtgctgaccgcgctgttcagcatcaatgccggccaggcggtgaccttctacacggcgcagttctacgtgctgttcttccttacccaggtgctcaaggtcgatggcggcaccgccaacggtctgctgatcgtcgccctggtgcttggcgcgccgttcttcatcgtcgccggctggctgtccgaccgcatcggccgcaagccggtgctgctggccggcctgttgctcgccacgctgttctacttcccgctgttcaagggcctgacccactacgccaacccggccatcgaccaggccagccggcagtcgccgatcagcgtggtggccgacccggcgacctgcactttccagttcgacccggtaggcaaggcgaccttcgacagcccctgcgacaaggtcaagaccttcctggtcaaggccggcctgccctactcgacggtggcggcgcccgccggcagcgacgtcagggtgcggatcggcgagaccgagatcgccggcttcgacgccgaagcgatggcggccgcggtgaagacggcaggctatccgcagcaggccgacggcagccaggtgaacaagccgatggtgatcgccatcatcttcgccctggtactgatctccaccctctgctacggcccgctggcggcgctgatggtcgaactgttcccgacccgcatccgctattcctcgctgtccctgccgtaccacatcggcaatggctggttcggcggcttcctgcccacggtctcgttcgccctggtggtgtacaccggcgacatcttctacggcctctggtatccggtgctgatcaccggcggtagcctggtctgcgccttgctgttcctccgcgaaacccgccataccgacatccaccggtgaaatcgcgccccgttcccggcatggggacggggcgcacattccctccgtgatgagcctgtcttctcagaaaagtctggcttgccagttttctttctttctctttctgccacacttctggcgtcaaaaaacgcctttccagcgcctacaatagcgggaaaaccctatggcgctgcttgccggtgccggggacggcctatacagtccgcgcgattgacgggccgttgtggcggcaggaacgaatccggactcgagtcttggggaaaaatgtgaagaactggactgttcgccagcgaatcctggcaagtttcgccgtgatcatcgcgatcatgctgctgatggccgctactgcgtacgtgaagatgttgacggtggaaaagggcgcctaccgtgtccaggacgacgccatgccggggatgtacttcatcacgctggtacgcagttcgtggaccgacaactacttgcagacccaggaactgttcggcatcaccgacgaccacgagctgagcaaggccgaggccgacagtatcctcgccagcgaggagcgcctggaccagcagatcgcctcctaccagaagaccatgaaccccgacgaggcccgcgaccacgagttgctcgccggtttccaggccgtgcgcaaggactacctggagcagcacgacaaggtgctcgagctttaccgcgagaagcgcttcgaggaagccggcaagctcgtcgccggcccgttgaccgagcactggcgcgagggccgcaagtacctcaacgagatgatcgagctgaacaaggacatcgccgatcgcgcctcggagaacatcgtcaacgcggtggacgacgccgaactgagcatgctggtgaccctgttgctggcggtggtggtagccggcatctgcgggttcctgctgttgcgggcgatcacccagccgatccagaagatcgtccgcagcctcgacctgatggccggcggcgacctcaccgcgcgcctgaaccttggccgccgcgacgagttcggcgccatcgagaccggtttcaatggcatggccgaggaactcaagggcctggtgtcgcaggcccagcgttcttcggtgcaggtcaccacctcggtcaccgagatcgccgcgacctccaagcagcagcaggccaccgccaccgaaaccgctgcgaccaccacggagatcggcgccacttctcgcgagatcgccgccacctcgcgcgacctggtgcggaccatgagcgaagtctccggtgccgccgagcagacttcgaccctggccggttccggccagttgggcctggcgcgcatggaggaaaccatgcaccacgtgatgggtgcggccgacctggtcaacgccaagctggcgatcctcaacgagaaggccggcaacatcaaccaggtggtcaccaccatcgtcaaggtcgccgaccagaccaacctgctctcgctgaacgccgccatcgaggcggagaaagccggcgagtacggccgcgggttcgccgtggtggccaccgaggtgcgccggctggcggaccagaccgcggtcgccacctacgacatcgagcagatggtgcgcgagatccagtcggcggtatcggccggggtgatgggcatggacaagttctccgaggaggtccgccgcggtatcgccgaggtcggccaggtcggcgagcaactgtcgcagatcatccagcaggtgcaggcgctggcgccgcgggtgcagatggtcaacgagggcatgcaggcccaggctaccggtgccgagcagatcaaccaggcgctggtgcaactgggcgaggccaccgggcagaccgtggagtcgctgcgccaggccagcttcgccatcgatgagctgaacctggtggcgaacgggctgcgcaacggcgtatcccgcttcaaagtctgaggctgtgaccgtgtcccgctccaccggcgatcatcgacgcaccagcaagctgttcctgctgttccgcatggaaggcgaccgctatgccctggatgcccgcgaagtggtcgaagtgctgccgctgctgcgcctgaagcgcattccggaggcgccggaatgggtcgccggggtgttctcccatcgcggcgtcctggtcccggtgctcgacctctgcgcaatggccttcggccgcgcggcgctggcccgcaccagcacgcgcatcgtgctggtcgaataccgcgcccgccaggaccgggagccggtctggctcggactgatcctcgaacaggccaccgataccctgcgctgcgaaccgtcggcgttccgcgactatggcctggacaacggcgaggcccgctatctcggtccggtctatgaaggaccacggggactggtgcaatgggtgcgggtcgaggcattgctgcccgacgaagtgcgcgccctgctgttcccgccggagtgcggcgaggggacggcatgaacgatcgcttcgaacgcctgctcaagagcaggatcggcctggatgccagctcggtgggcagcgcggtgatcgagcgcgcggtacgccagcgcatgagcggcctcgcgctgcacgacgaggacgaatactggatgcgcctgaacggctcgccgggcgaggtgcaggcgctgatcgaagcggtggtggtgccggagacctggttcttccgctacccggagtcgttcaccaccctcgccaggctggccttcgagcgcctgccgagcctgggcggcggacgcgcgctaaggatcctcagcctgccctgttccaccggcgaggagccgtattccatcgtcatggccttgctcgatgccgggctctccgagtacctgttcgaggtcgacgccctggacgtcagcgctcgggtgatcgagcgcgccagcctcggggtgtacggcaggaattccttccgcggcgacgaactggggtttcgcgaccgccatttcagcgaggttgccgatggctaccagttggccgagcaggttcgccgcaaggtgcgcttccgctgcggcaatttgctcgatcccgggctactggcgggcgaggcaccctacgatttcgtgttctgtcgcaacctgctgatctatttcgaccgcccgacccagagcgaggtggtcgaggtgctcaagcgcctgttgcggccggacggcgcgatgttcatcggaccagccgaggcgagcctgctcagccagcatggcatgcagccgatcggcgtgccgctgtctttcgtgttccgccggaccagcgaggcgccccgcggcgcgcggcccaaggcggaaagcgacggagcgcgcccggtcgttgccgccgccgtggagcgtgcgagtgttcggccttcgccgtcgccaccggcgaaaccgcgccagcggctgtccagcctggttccgccagccagcggccagcccctcgccagtcccgtcggcgagttcgacgaaatcgcccgcctggcggatgccggccagcaccgcgaggcgcgcgccgcctgcgagcgccaactggccgcgcgtgggccgtcggctacggtcttctactggctcgggctgctcagcgatgtcgccgggcaggagcaggaagcccaggatttctaccgcaaggccctgtacctggagccgcagcacgccgaggcgctggcgcacctggcggcgctgctcgccgctcgcggcgaccatgccggcgcccggcgcctgcagcaacgtgcggcccgtggagtgaacaaagatggttgaggcgagcctgaccttgctcgatacccaacaggtggatgactgctggaaccgcatcggcgtgcatggcgacaagtcctgcgaacgcctggccgagcatgtccattgccgcaactgcgaggtttacgctgccgcggcgacctacttgctggaccgcatcgccctgcgccaggaccagctcgacagcgccgaaacgatggacagccagcgcgaacagagcgacctcggcgagacgcgctcgatcctggtgttccgcctgggcgaggagtggttcggtctggccaccggcagcctggtggaagtggcgccgatgaaccctatccattccctgccgcaccagcgctcgcgcgccctgcaaggggtgaccaacgtgcgcggcgcgctggtcgcctgcctttccctgggcgaactgctggatctcgaacccggcgccgcgccggtcagcgagcgccgggtggttccgcgcatgctgatcatttccgccgccggcggtccggtggtggcgccggtggaggaagtcgacggcatccatgcgattccgctggcgcggatactgccgcccaaccacgccgacggccaggcctcgcgccggcacgtggccggcgtgctgcaatggcgtgagcggagcatcaccctgctcgacgaaggccctctcctgcaagccgtagcgcggagcctggcatgaccccggaccagatgagagacgcgtcgctgctcgagctgttccggctcgaggcggaggcccagacccaggtgctcaacgccggcctgatggcgctggagcgcagcccgacccaggccgaccaactggaagcctgcatgcgcgccgcgcactcgctgaaaggcgcggcgcggatcgtcgggctggacgccggcgtgcgcgtggcgcacgtcatggaggattgcctggtggaggcgcaggacggacgcctgctcctgcaatcggaacatatcgatgcgttgctccagggctgcgacctgttgctgcgtatcggcaccccgcccgccggcgacgcaggctgggccgaaggcgccgggcgggaagagatcgacggcctggtgcagcgcctcgaaggcctggtgcgcagcggcctgccgctggcccgcgcggagctgccggcgacgactcccggcctgccggaagcggcccccgaggcgccgccagcggcgtcagcggccgccagcgacgacaacgacgaagagcccgccgggcaggcgggcggcgaacaggccgaggagcgccgcagccgggtcctgcgggtcaccgccgagcgcctggaccggctgctggatatctccagcaagtcgctggtggagttccagcgcatcaagccgctggctgattccctgcaacgcctgcgtcgcctgcagtccagcgccagccgcgcgctcgacgtggtacgcgagacggtccaggaaaccgccctcgacccgcaggcccaggccatgctcggcgaggcgcggcaactgatcggcgaatgccagcagatgctggtgcagcacatcgccgatctcgacgagttcgcctggcagggcggccagcgcgcccaggtgctctacgacgcggcgctggcctcgcggatgcgaccgttcgccgacgtccttagcggccaggcgcggatggttcgcgacctgggccgctcgctgggcaagcaggtgcgcctgctggtcgagggcgaaagcacccaggtcgaccgggatgtcctggaaaaactcgaagcgccgctcacccacctgctgcgcaatgccgtcgatcacggtatcgaggcgccggaaacccgcctcgccgccggcaagccggccgagggcaggatcaccatccgcgcccgccaccacgccggcatgctggtcctggaactgagcgacgacggcggcggcatcgatctgcagcgcctgcgcgagaccgtgctcaatcgccagttcgccaccgccgagaccgcggcgcaattgagcgaggaggaactcctggcgtttctcttcctgcccggcttcagcatgcgcgagcaggtcaccgaggtgtccggtcgcggcgtcggactggacgccgtgcagcacatggtccgccagttgcgtggcggcgtgcgcatggagcaacgccaggggcagggcacgctgttccacgtcgaggtgccgctgaccctgtccgtggtgcgcagcctggtggtggagatcggcgaggaggcctacgccttcccgctggcgcatatcgagcgcatgtgcgagctggaagcggaggagatcgtccagctcgaaggtcgccagcacttctggtacgagggtcgccatgtcggcctggtctcggctgcgcaactgctgcagcggcccgagagcagccgcaccgaaggggccatcccggtagtggtggtgcgcgaccgcgatgcggtctacggcgtcgccgtggagcgtttcgtcggcgagcgtaccctggtggtgatgcctctcgatccgcgcctgggcaaggtgcgcgacgtttccgccggcgccttgctggacgacggttcgccggtgctgatcctggacgtcgaggacctcctgcattcggtcggcaagctgctcagcagcggccgcctggagcgcatcgatcgcagccggcggcaggccggcggggcgcaacgcaagcgcatcctggtggtcgacgactcgctcacggtgcgtgagctggaacgcaagctcctgctcggtcgcggctacgacgtggcagtggcggtggatggcatggacggctggaacgccctgcgctcggagcatttcgacctgctcatcaccgatatcgacatgccgcgcatggacggtatcgaactggtcaccctggtgcgtcgcgacagccgcctgcagtcgctgccggtgatggtggtgtcctacaaggatcgtgaggaggaccgtcggcgcggtctcgacgccggcgccgactattatctggcgaaggccagtttccacgatgaggccttgctggatgccgtcgtcgtcctgatcggagaagcacagggttgaggatcggaatcgtcaatgacatgccgttggccgtcgaggcgctgcgccgcgcgcaggccttcgagccgcagcaccagatcgtctgggtcgccagcaacggtgccgaggcggtgacccagtgcgccgccgatacgcccgacgtggtgctgatggacctgctcatgccggtgatggacggcgtcgaggcaactcgtcggatcatggcggaaagtccttgcgcgatcgtgattgttaccgtcgatatcgagcagaatgtgcaccgggttttcgaagcgatgggatatggggcgctcgatgcggtgaacacgccggcgctgggcatcggcaacccgcaaacggcggcggcgccgttgttgcgcaagattcagaacgtcggctggctgatcggccagcgcgataaccgtggcaaggtccaggtggtgccgccgaaggccggcggggcgcgccagcgtctggtggcgatcggcgcctcggctggcggtccggcgtcgctcgcggtgttgctcaagcaactgccggccagtttcaatgccgcggtggtgctggtgcagcatgtcgacgaggtcttcgccgccggcatggccgaatggctggccagcgaatcgaagctgccggtgcgcctggcgcgcgatggcgagccgccgataccggggcagatcctgctggcggggaccaacaatcacatccgcctgttgcgcaacggttcgctggtgtacaccgccgaaccgcgttctttcgtctaccggccgtccatcgacgtgtttttcgagagcgtggcgaactactggcgtggcgacgccgtgggcgtgctgctgaccggcatgggccgcgacggcgcccagggcctcaagcagatgcgcgagcgcggcttcctcaccatcgcccaggaccaggccagttgcgcggtctacgggatgccgaaggccgcggcggcgatcgatgccgcggtgcagatcctttccctggaaaagatcgccccgcgcctggcggaggtattcgattagccgggcgcgagtccggtcaggcgccagggtaggcgccggcgcccgccgtggcggtgcgtggaacagcattcaatttgatacgaggggccccggtcccggagagaaacatgcacaaccctcatgagagcaagaccgacctgggcgcccctctggacggcgcggtcatggtactgcttgtcgatgatcaggccatgatcggagaggctgtgcgtcgctcgctggcgagcgaggcgggcatcgacttccacttctgttccgatccgcagcaggcggtggcggtggccaaccagatcaagccgacggtgatcctccaggacctggtgatgcccggcgtcgacggcctcacgctgctcgccgcctaccgcggcaacccggcgacccgcgacatcccgatcatcgtcctgtcgaccaaggaagagccgacggtgaagagcgcggcgttcgccgccggcgccaacgactacctggtcaagctgccggacgccatcgagctggtggcgcggatccgctaccactcgcgttcgtacatcgccctgcagcaacgcgacgaggcctatcgggcgctgcgcgagagccagcagcagttgctggagaccaacctggtgctgcagcggctgatgaactccgacggcctgaccgggctctccaaccgtcgtcacttcgacgaatacctggagatggagtggcgccgctcgctgcgcgagcagtcgcaactgtcgctgctgatgatcgacgtggactatttcaagagctacaacgacaccttcggccacgtcgccggcgacgaggccctgcgccaggtcgccggggccatccgcgagggctgcagtcgctcctcggacctggcggcgcgctatggcggcgaggagttcgccatggtcctgccgggcacctcgccgggcggcgcgcggctgctggcggaaaaggtccggcgtacggtggagagcctgcagatcagccacgaccagccacgcccgggctcgtacctgaccgtcagcatcggcgtcagcaccctggtgccgggcggcggcggacagaccttccgggttctcatcgagatggccgaccaggcgctctaccaggccaagaacaatggccgcaaccaggttggcctgatggaacaaccggtgccgccagccccggcgggctgagcggcgcgcggcggccatgcgtcgccggccggcattaaatagaggccggcgtactgcctgtggggcgcaagtgcagtatacttcgcagcttttcgacgttttcccgcgagtgagcgccagccatggaaatcaacccgatcctcaacagcatcaaggacctctccgagcgcacccagaccattcgggggtatctttgactacgatcagaagcatgatcgcctggtcgaagtaaaccgcgagctcgaagaccccaacgtctggaacaaccccgaatacgcccagaacctcggccgcgagcgcgcccagctggcgcaggtggtggaaaccctggacgacctgaccagcggcctggccgattcccgcgacctgctggacatggcggtcgaggaagacgacgagggtgccgtcgacgacgttgccaacgaagtcgagcgtctgcgcgagatcctcgagaagctggagttccgccgcatgttcagcggcgagatggacccgaacaacgcctacctggacatccaggccggctccggtggcaccgaggcccaggactgggccaacatgctgctgcgcatgtacctgcgctgggccgacaagcacggcttcgacgccactatcatcgagctgtccgagggcgaggtcgccggcatcaagggcgccaccgtgcacatcaagggcgagtacgccttcggctggctgcgcaccgagatcggcgtgcaccgcctggtgcgcaagagtccgttcgactccggcaaccgtcgccacacctcgttcaccgcggtgttcgtatcgccggaaatcgacgacaacatcgagatcgagatcaacccggccgacctgcgcatcgatacctaccgctcctccggtgcgggcggtcagcacgtgaacaccaccgattcggcggtgcggatcacccacgtgccgaccaataccgtggtggcgtgccagaacgaacgctcccagcacgccaacaaggacaccgcgatgaagatgctgcgggccaagttgtacgagctggaaatgcagaagcgtaccgccgcgtcccaggccctggaggactccaagtccgacataggctggggccaccagatccgctcctacgtgctcgaccagtcgcggatcaaggacctgcgtaccggtatcgagcgcagcgactgcgacaaggtgctcgacggcgatctagacgaatacctcgaagccagcctcaaacaggggctgtaaagctgctgcgcctggccaggccgcgttggaaaatggttcggactgctcgtttttttatgatcgtgaactccgtgtcctcgccatttcccgccttgcctggccggcgttcgctacgcttttcgcccctgttgcgcaatccgtttccacaggcaagagagcctaaccaggaaccaccaagaccatgagcgaccaacaactcgaccagcacgaactgcaacaggaagaaaacaagctgatcgcccagcgcaaggaaaaacttgccgccgtgcgcgaagcccgggccatcgccttccccaacgacttccgccgcgacgcctacttcgcggacctgcagaaacagtacgccgacaagaccaaggaagagctggaagccgcagcgatcccggtcaaggtggccggtcggatcatgctcaaccgcggttccttcatcgtcctccaggacagcagcgagcgcctgcaggtctacgtcaaccgcaagaccctgccggaagaaaccctggccgagatcaagacctgggacctgggcgacatcatcggcgccgaaggcgtgctggcccgctcgggcaagggcgacctgtacgtcgacatgaccagcgtgcgcctgctgaccaagtcgctgcgtccgctgccggacaagcaccatggcctgaccgacaccgagcagcgctaccgccagcgctacgtcgacctgatggtcaacgaggaaacccgccacaccttccgcgtgcgttcccaggtcatcgcccacatccgccgtttcctcagcgagcgcggtttcctcgaagtggagaccccgatgctgcagaccatccccggcggcgccgcggccaagccgttcgagacccatcacaacgcgctggacatggccatgttcctgcgcatcgccccggagctgtacctcaagcgcctggtggtcggcggtttcgagaaggtcttcgagatcaaccgcaacttccgtaacgaaggcgtctcgacccggcacaaccccgagttcaccatgctcgagttctaccaggcctacgccgactacgaagacaacatggacctgaccgaggaactgttccgcgaactggctcaggcggtactcggtaccaccgacgtgccctacggcgacaaggtcttccacttcggcgagccgttcgtgcgcctgtcggtgttcgattcgatcctcaagtacaacccggagatcaccgccgccgacctcaacgacgtcgagaaggcgcgggccatcgccaagaaggccggcgccaaggtcctcggccacgaaggcctgggcaagctgcaggtgatgattttcgaggaactggtggagcacaagctggagcagccgcacttcatcacccgctaccccttcgaggtttcgccgctggcccgccgcaacgacgaagacccgagcgtcaccgaccgcttcgagctgttcatcggcggccgcgagatcgccaatgcctattccgagctgaacgacgccgaggaccaggccgagcgcttcatgttgcaggtcaaggagaaggacgccggcgacgacgaggcgatgcactacgacgccgacttcatcaatgccctggaatacggcatgccgccgaccgccggcgaaggcatcggcatcgaccgcctggtgatgctgctgaccaactcgccgtcgatccgcgacgtgatcctgttcccgcacatgcgcccgcaggcctgagcgccgcaacagtccatggaaaagccgccttcgggcggttttttcatggccgcgcggtgtcccggccgccgggccaggggccgatagccgccgatccgccggctgaccacggaaggtgcgggtgggatcggagcttccccgatagcggccgattgattccacgcgaaaaagtccgaacaatgccccatcgtccgcgagcggaggaaacaccgtgtcccgagtagctcccagagacagcgccgcgcaggccgccagcgcggtagccgaaagcgttcgttaccagggccgcaaggccagccgccagggcagcgagcagcggcgccaggcgattctcgatgccgccatgcgcctgatcgtccgcgacggcgtacgggccgtgcgccaccgcgcggtggccgccgaggcccaggtgccgttgtcggccaccacctactacttcaaggacatcgacgatctcatcaccgacaccttcgccctcttcgtcgagcgcaacgcagaggcgctgtcggcgttctggagcagcgtggagggcgacctccaggagatggccgcggtgctggccgacgaccccggcgcccgtggctcgctggtggagcggatcgtcgagctggccgtgcagtatgtccaggtccagctcaccgagcgccgcgagcacctgctggccgaacaggccttccgccaggaggcgttgctcaacccgcgcctgcgcgaactggccgatgcccaccagcggatactctccctcggcgccgtgcatttcttccaggtgctcggttccgggcagcccgagcaggacgccaaggtgttgacgtcgattattctgcagatggaatatcagggcctcgtggacggggtcgagcaactggccgtggacgaaatgcgcgccatactcagacggtacctgaatctggtcatgggcctgtgacctgagcgtcaaccccgccatggcggggtttttcatacccgaaccttccctcggccagccggtcgcaggttgcggagggttcctaaggagcgtgtgatgaaagcctggcgttgcctggtggtcctgagtttcctgctgttgggcggttgcctggtcaccttcaaggagccgataccgccgcgcgaggcggcgccgagccatctgctcgggacctggagccgcgagaacgagtggaaggaagaacaattcctggagatcacccgttccggcagcaatgtctaccgtgcgctcagctacgtggacagcaaggacaataccgagagcctggaagactacggcttcaccgtctcccaccagggcaagcgctggtacctgtcggccggcctgccgaagagcctgggcggcaacttcatcgtcgccggcttcgagatcaccgacggtgacgagctggtgatctacaacctcgacgtcgagcgcatcgtcgaggacctcggcgccggccagctcgacggcgagaccgtcgacagcgatcagggcaagggcgcgctggtgcgcagcccgttggcgaaggtcttcgcctacctgaacgatcccgccaattccgacgtgttcgtcgaggccgcccgcttccagcgggtcactcaatgagattgccgatgagccagcgcaaggcgcagaacgactaccagaagatcatccgctccctgtccgatcgcatcgtcgaggcgcagacgccgatccgcgtgctggatgcgatcaaatgggacgacgggatccgccaggacttcctcaagggccgcggcaagcatgcgccgaaggtcgaccgcggctactacgacagccgcccgctggccttcgacgccagcgccaagaagcaggaattccagaacatcgagcgcgacatcacccgccagttgggccagttcaacccggtcgggcagatcatgcggcggatgtgcaaggaataccggatggtcattcgcatgctcgaggcgcgcggcaccccggacctcgggctgatctcccaggaactctacggctcggcctcggacgccttccatgccggcgatccgaccctggccgacctcggcctgatgctctccgactacctgaacaacatcgccgaccgcggcgatctcaaggacgaacccaagaccctgaccgccaaggaggtcgtaccgatcctccaggcgcggctgaacaccgtgttcggcgaggaggagggcaccatccgcgtgttcgagtccgacggcatcgtcgccgacgcggcggccggcgccgactacatcaaggtacgcgccgacgccctgttcaacgagcgcgacgtgcgcgcgctggaggtccacgagggcctggtgcacgtcggcaccaccctgaacggcctgagccagccgatctgcaccttcctcgccaagggaccgccgtcctccaccgtgacccaggaaggcctggcgatcctgatggaggtgatcgccttcgcctcctacccgacccgcctgcgcaagctgaccaatcgcacccgggcgatccacatggccgaggagggcgccgatttcctcgacgtgttccacttctaccgcgagcagggctacagcctggaggacagctaccagaacgccagccgggtcttccgcggctcgaccccggatggcctgccgttcaccaaggacctgtcctacctgaagggcttcatcctcatctacaactacatccagctcgccgtgcgcaagggcaagctcgaacagatccccctgctgttctgcggcaagaccaccctggaagacatgcgcaccctgcgccaactggtggacgagggcctggtggcgccgccgaagtacctgccgccgcagttccgcgacctcaacgcgctgtcggcctggatgtgcttctcgaacttcctcaaccacctcagcctggaccgcatcgaagcggactacgcgaacatcctctgaccgttccccgccgtgccggtctttcccggtgcgcgcgggcggtcggccggcaagcaaggagaacggcgatggccagccacgaactcgactaccgcatcctcggcgaatccatgcagaccgtggagatcgaactcgaccccggggaaaccgtgatcgccgaggccggggcgatgaactacatgaccggcgacatccgcttcaccgcgcggatgggcgacggctccgacggcagcctgctgggcaagctgtggagcgccggcaagcgcaagctcggtggcgagtcggtgttcatgacccacttcaccaacgaaggccagggcaagcagcacgtggcctttgccgcgccctatccgggcagcgtggtggcggtggacctggacgatgtcggcgggcgcctgttctgccagaaggactcgttcctctgcgcagcctatggcacccgggtcggcatcgccttcaccaagcgcctgggcgccggtttcttcggcggcgagggcttcatcctgcagaagctcgagggcgatggcctggtcttcgtccacgccggcggcacgctgatccgccgccagttgaatggcgagacgctgcgggtcgacaccggttgcctggtggccttcaccgacggtatcgactacgacgtgcaactggccggcggcctgaagagcatgctgttcggcggcgaaggattgctgctgaccaccctcaagggcagcggcaccgtctggctgcagagcctgccgttctcgcgcctggccgggcgcatctacgacgccacctttcgcgcccgcgaagaggtaaggaccaacaacggatgaagcgcctgctgatcccgctgctggtactcggcgcgctgttcctcggtggctgcagttcgctgctgttctatcccgagccggtggtgcagatcactccggcgcgcgccgggctggagtaccgcgacgtcaccctgaccaccgccgacggcgtgcgcctgcgcgcctggtggctgccggcgaagaaaggcgtgccggtgaaaggcactgtgctctacctgcacggcaacggcggcaacctgtcctggcacctcggcggcacgtggtggctgcccgccgagggctaccaggtgctgatgctcgactatcgcggctacggccagtcggagggccagccgggactgccggaggtctaccgcgacatcgacgcggcgttcgcctggctcgaccaggcgccggaggtgaagggcaccgagcgcgtgctgctggggcagagtctcggcggcgcgctggcgatccactacctggccgagcatccgcagcgccagggccagttcaaggcgctggtgttcgacggggtaccggcgagctaccgcggcatcgcccggcacatgctggacggttcctggctgacctggccgctgcaggtgccgctgtcctggctggtgcccgacgacgacagcgccatccattcggtggcgcggctttctggcgcacccatgctgttctttcacagcatcgacgataccattgtgcccctcgagaacggcatcgccctgtaccgccaggcgcggccgccgaaggtcctgcaactgacccgaggcggccacgtgcagaccttcgccgaagcgacctggcaggaagtgatgctgcgcttcctcgacgatccccatggcttcaccggcctgcgccggctggccgaaatcccgaaccgcgaatccgcgaaacccgaaggcaatccatgagcgaccgtaacgtactcccctgcatcctgaccggcatcggtaccatcttcgtcaccgtcggcgtgctctggtactacggctacctgcatttcgccaagccgcaggacgccctgttgctggccgacttcaccatgctgaagagcctgcccggcgaagatgtgaagctgtccctggagccggccaagcaggtcgcgcagtgcatcgatggcgtcctggtgctgttcgacaccgagcagaagggcctttccggcgtgctggtggacaacaggaagcacgccgtgcgctgcgccggacaggaagtcccgcaggaagtgaaatgaccgaggtccgcgtctggcagggggacatcacccgtcttgcggtggatgccatcgtcaacgcggcgaactcctcgctgctcgctgggggcggggtcgacggcgccatccaccgtgccgccggtgccgagctggtggcggcctgccgcctgctgcacggttgcaagaccggcgaggcgaagatcacccgcgggttccgtctgccggcggcccacgtgatccacaccgtcggcccggtctggcgcggcggcgacaacggcgaagcggagctgctggccagctgctaccggcgcagcctggccctggccgagcaggccggggcggccagcgtcgcgttccccgccatcagctgcggcatctacggctatcccttggagcaggccgcggccatcgccgtcgaagaggtctgccggcaacgcccggcgcacagcagcctggaggaaatcgtcctggttgccttcgatagctcgatggccgagcgctaccagcgcttgctcggcgagcggcctgtggcccgctgatacctggaaagctcaagccccgcccatgaaaaagccccgccggatggcggggcttttgggcttccgtagggcttatcagccgctgacggaggagcgtggcgcgaccggcttggcgtcgttggaaatggtgacttccacccgacggttcatggcacggccggagctggtgccgttgctggccaccggatattccttgccgtagccacgggtggctacgcgttccgggctgatgccgcggctgagcagggccatgcgcaccgagtcggcacgacgctcggacaggcgctggttgtagttggcggaaccggtgctatcggtgtagccctctacgatcacctggcgctccgggttctgctggaggaactcggccagttgctggatgttgcgcatggcgccgggcttcaggtcggacttgtcgagatcgaacagaacgtcgccgaaggtcaccatggtgccgcgcgaggtctgcttggcattcagttggctacgcagcttgtccagttgcgcggtgcgcgcgtcgaggcgggcctgggcgcgctgggcggaggcattttgcaactgcgcctcggcattgcgcaggacgatggtctgcttggccagttcgatgcgctggttggtcaggtaggccagttggtccacgtcgcgctggtcttcgccatcctggtaggccttgtcggccttggccagccagtcgccggcgtccttggtttccagggccgcgaccttggtcgcgtcgggctgcgactgcagcgcggagaagttgctgcgggcctgttccaggttggcgttcggcggcgtggagcaggcggccagcgccagggccagcagggatacggcggggagggcaatgtacttacgcataggggtcatccttaatcacgaatcgacgaaagaagggcggaatccggcttagtgctgcgtatcgcgcatgccttcctcacgcagttccatgacgccctgctgggcatccttcacggctttctgcgccttggcggcctgggtcttgcgctcggcgacccgggcgtcccactcggcctgctgcgccaggcgcttggcctggtcgtattccttgtcgttcatggcgatgcgcgcctggctcagcttgtcctgagcggacttcatctcgaccggggcatattccgggccgccggcgctcaccgcgttattcaccgcggattcggtcacggcgaactgctcggtcggcgggttgccggcgcagccggccaggaccaggctgctgcctacggccagcagggccagcttgaggccacgcagggaaccggtgtgttgcttgctcatcgctttttgctccatgggaaatttcctctgacagggatgctgattccttggctttcatctctggccattaccgtgggcgcgtttccggccctccggtcttttcttcctgctcactgagcaagcctctgccaggcctctgtttcaggggcttggcgattggccatgtacttttagtgactcccccgctggttcaggggttcaaaaaaaaatctgaaattttctgactgaacagtcggcttccggcgtggtcgcagaacgccacctctgctcactaaagcccgtcctacagggctctagtccacgaaacgcacaactgccgcagcgctccaggacggaacactcgggcagaaaaaagccccacctgagtggggctggaggaggccagtggggccttttagaaacgtttgcgcaacagtcgcagaccgttgaacaccaccagcaggctggcgcccatgtcggcgaataccgccatccacagggtgccttcgccggccagggtaagggcgaggaacaccgccttgatgcccagggccagggtgatgttctggaccaggatcgcgtgggtggtgcgcgacagccggacgaattgcggcaacttgcgcaagtcgtcgtccatcagcgcgacgccggcggtctcgatggccgtgtcggtgcccgccgcgcccatggcgaagccgatgtcggcgcgggccagggccggcgcgtcgttgatcccgtcgccgaccatgccgacccgcgagccgtcggcctggcgcgcttccacttcacgcagcttgtcctccggcaggaggttgccgcgagctgcgtcgatgcctacctgggcagcgatggcggctgcggtgtgcgggttgtcgccggtgagcatcagggtcttcacgtccagcgcgtgcagctcgcggatcgcctcgcggctgctgtccttgaccccgtcggcgacggcgaagagggcccgcacgcgctgcggatcgcacagcgcgatgaccgtcttgccctggcgctccagggcgtccaggcgctcttccagggccggcgagcagaggcccagttcctccaccaggcgatggttgccgaggtggtagaggacgccgtcgatgcgtccgctgacgcctcgtcccggcaaggcagcgaggtcctcgaccacgcccagggcaaggccgtcctcttccgctgcgttggccacggcgcgcgataccgggtggtcggaacgcgcggccaggctggcggcgagcaggcgcgcatccgtcccgtcagcctccgcgatcggcaggtagtcggtctgttgcggtttgccatgggtgatggtgccggtcttgtcgagggcgacccaggacagcttgcgcccgagttcgaggaacaccccgcccttgatcaggatgcccaggcgcgccgcggcggaaaggccgctgacgatggtcaccggggtggagatcaccagcgcgcagggacaggcgatcaccagcagcaccagggcgcggtagatccagtccagccaggcgccgccgaatagcagcggcggcagcaccgcggtggcgagggcgatgaggaataccaccggggtgtagacgcgggcgaaactgtcgacgaaacgctgggtcggtgcgcgggaaccctgggcttcctccacggcgtggatgatccgggccagggtgctgtcgtcggcgcggcgggtgacgcggtactccagcgcgccctcgccgttgatgctgccggcgaacaccggctcgccgacctccttctccaccggcaggctttcgccggtgatcggcgcctggttgacgctggagcggccgctggtcacctcgccgtcgagtgcgatgcgttcgccgggcttcacgcgcacggtggcttccagttccacttgcttggccggcagttccttccattcgccgccgaccagcacggtggcctgttccggagccagttgcagcaggccgcggatggcgttgcgcgcgcgatccagggacttcgcctcgatcaactcggcgatggcgaacagcacgctgaccatcgccgcttccggccactggccgatgagcacggcgccggtcacggcgatgctcatcagggcgttgatgttcaggttacggttcttcagtgcgatccagcccttgcggtaggtcggcaggccggcgccgaggatggccagcagggcgaggccggcgaccacccagtccggcgccaggccgaaccattcgacgatctccgaggccagcgccatcgcgccggccagggccagcggccaccagggtttcgccggcgcttgcgaggggccgtcggtattttcgccggcatccagcggcaccgcttgcatgccgaggccggcgatcagcttctgcagcggctcgacgctgtcgaagcgatgctggacgcgcagcaggcgctgcatcaggttgaattccagcgactccactgccggctggcgaccgagggcgtcgcggatcaggcgctcctcggtcgggcagtccatcgcttcgatgcgcaggtcgctccagcgcaactcggcgttgccggccagggttccgatggcggccaccgccgggcgaggcgcgtggcggtgcccatgatcatgtccgtgaccgtgacagcaagtgtcggcgtgttcgtggctcatggaaacaattcccgtttgacgtgttgggtgcgattgcacaccctgtagcaactacagagtcaagcggtactgccaattcgggtagccgcgtcggcgattggaggagggttggcatgaagatcggtgagctggcgaagagaaccggttgcccggtagagaccatccgctactacgagcgcgaaggcctgttgcccgagcccgcgcgtagcgaaggcaactatcggcaatacaccctggcgcatgtcgagcgcctgtcgttcatccgtcactgccgctcgctggacatgacccaggaggaaatccgtaccctgctggcgttgcgcgaccgtcccgaggcggattgcggcaccgccaaccggttgatcgacgagcacctgcatcacgtcgaggtgcgcatcgccgaactccaggcattgcgcgagcaactgcgggatctcggctcacgctgtacggtcgccggcaacagccaggcctgcggcatcctccgcgaactggagcagcccgcgccgctgtcgccaatcgccgaggaatgcgccgaggccgggcacatgcacgtccccggcgtgcaccgccggcatggctgaagccgcgctcagtgactggaggtgtcctgttgcgcgaccagttcgtgcaggtacttgcgcgagagcgacaggaagcgtggggtagggccgacatcctcatagagcggatcgccctgttcgtcggtggccaccacctgactccccttcacgtagggaaagctcgcctccagttcttccagggcggcgccgaccagctcgcccagtagttcctcgacgctgcgccgcggatacatctcgtgcagcgcggcgaggcgcgcggcgctttcgacgtccagcgggatgctgtagtggttgcgggccatgcggcccttggcggtgtgttcccaatggcggacaagctcacggatcttcatgctgacctcttcagcccggtcgtggcgggcgtgctggggggccctcgtggggccgtgcctcggtgcgggcacttccttcagactagacccgatcggcgccggcagcctcgcttccggcccggcggcgccgtactggcaccctgcgggcttgtaagcgcgggggcgcctgagccaagctggtttcccacccgcagtggagacaggtcatgccggagatcgatgcgcgcctgcgcgaggacgtccaccaactgggcgaattgctcggcgacaccatccgcgagcagtacggcccgcggttcctcgacaagatcgagctgatccgcaagggcgccaaggctgcccgccgcggttccgcggagggcgcccagcagctcaccgccaccctcgacgggctcgaggaagacgaactgctgccggtggcgcgggccttcaaccagttcctcaacctggccaatatcgccgagcaataccaccgtatccgccggcgccggccgaacgagccggaacccttcgagaacctggtgctggaagagctgctggggcgtctcaaggacgccgggcatgcccccgggcaactggctcgccagctcgccgggctggagatcgaactggtgctgaccgcccatcccaccgaggtggcgcggcgcacgctgatccagaaatacgatgcgatcaccgcgcagctggcggccaaggaccatgccgacctgctgccggaggagcgcagtcgcatccagcagcgcctgcagcggctggtggccgaggcctggcataccgacgagatccgcaaggtccggccgaccccggtggacgaggcgaaatggggcttcgcggtgatcgaacattctctctggcaggccttgccgaacgtccttcggcacgtcgacgaggtactcctgcgcagcaccggcgaacgcctgccgttgaccgccgcgccgctgcgcttcgcgtcctggatggggggcgaccgcgacggcaatcccaacgtcaccgccagcgtgacccgcgaggtcctgctgctggcgcgctggatggccgccgacctgtacctgcgcgatatcgaccgactggccgccgagctgtccatgcagcaggcctcgccgcagctgctggcgcgggtcggcgatagcgccgagccctatcgcgccctgctcaagcaattgcgcgagcgcctgcgcgtgacccgcaactggacccaccaggccctggccggcgaggtgccggccgcggagggcgtcctggagcacaaccgcgacctggtcgagccgctgcaactgtgccacgagtcgctgcacgcctgcggcatgggcgtgatcgccgatggcgcgttgctcgactgcctgcgccgcgccgccaccttcggcctgttcctggtacgcctggacgtgcgccaggactcggcccgccatgccgccgcgctgagcgagatcaccgagtacctggagctgggcagctacgacgagtgggacgagaagacccgcctggaattccttctcgaggaactgaacagccgccgccccctgctgccggcgcactaccagccttcggcggataccgccgaggtgctcgccacctgccgggcgatcgccgccgcaccaccggcgtcgctggggtcctacgtgatctcgatggccggccagccgtccgacgtgctggcggtgcaactgctgctaaaggaaagcggcgtcgactggccgatgcgcgtggtgccgctgttcgagaccctcgacgacctggacaacgccggcccctgcatggagcgcctgctgacgctgccgggctaccgttcgcggctctccggggtgcaggaagtgatgatcggctactccgattcggccaaggacgccggtactctcacggcggcctgggcgcagtaccgggcgcaggagaaactggtggagatctgccgccagcacgaggtcgagttgctgctcttccacggccgcggcggtaccgtcggtcgcggcggcgggccggcccacgcggcgatcctgtcgcagccgccgggttcggtggccgggcgcttccgggtcaccgaacagggcgagatgatccgcttcaagttcggtctgccggacatcgccgaacagaacctcaatctctacctcgccgcagtgctggaagcgaccctgatgccgccgccggctccggagccggcctggcgcgcgcagatggaccgcctggcgaaggacgcgctgctggcctaccgcagggtggtgcgcgacgatccgcagttcgtcgagtatttccgcctggccacgcccgagcaggaactgggccgtctgccgctgggcagccgcccggccaagcgccgcgaaggcggggtggagagcctgcgggcgattccctggatcttcgcctggacccagacgcgcctgatgctgccggcatggcttggctgggagaccgccttgctgaacgccatcgagcgtggcgagggcgcgctgctcgggcagatgcgcgagcgatggccgttcttcaccacccgcatcgacatgctggaaatggtcctggccaaggccgacgcggatatcgcgcggctctacgacgaacgtctagtgccgctcgagctgcgtccgctggggcgtcgtttacgcgacctattgtcgcaggcggtgcgcgtggtactgggactgaccgggcagtcgctgctgctcgcccacgccagcgagacccgcgagtcgatcagcgtgcgcaacagctatctagacccgctgcacctgctccaggctgagcttctggcccgttcgcggcgctgccggggcgacgcctgcggcggcctggagcaggcgctgctggtgacggtcgcgggggtcgccgccggactgcgcaacaccggatgagggaaggcggggggcaactttcggtgtcttgtgcggtgggggggcgctgtgtatcttggacagccttttcggcgccatacagtgccgtttcctgcaaatacgagattggccccacgaggcggatccagactttcgcttaccaattctaaggagcatatcgatgcgtgtgattctgctcggggcacccggtgccggcaaaggcacccaggcacggttcatcaccgagaagttcggcattccgcagatctccaccggcgacatgctgcgcgccgcagtcaaggccggcagcccgctcggccagcaggtgaaaggcgtgatggacagcggcggcctggtatccgacgacatcatcatcgccctgatcaaggaacgcatcaccgaggccgattgcgccaagggcttcctgttcgacggcttcccgcggaccatcccgcaggccgaagcgctgaaggacgccggtgtgaccatcgaccacgtggtcgagatcgccgtcgacgacgaggagatcgtgtcgcgtatcgccggtcgtcgcgtgcatccggcctccggccgcgtgtaccacaccgagcacaacccgccgaaggtcgccggcaaggacgacgttaccggcgaagagctgatccagcgcgaggacgacaaggaagagaccgtgcgtcaccgcctgtcggtctatcattcgcagaccaagccgctggtcgacttctaccagaagctgtcggccgccgaaggcaccccgaaataccacagcatcgccggcgtcggctcggtcgagcagatcaccgcgaaagtgctttcggccctgagctgatccgcagcgctgtagcaccgacggcccgcttgcgggccgtcggcgtttccggggcggcgaaggctggtacaatcggcgtctttttcaccacgcggaaccgtcgatgtccactctgttggccctggatacctccaccgaagcctgctccgtcgccctgctccacgaggggcgggcgctcagtcactacgaggtgatcccgcgcctgcacgcccagcgcctgctgccgatggtccgcgacctgctcgacgaggccggcgtcgccctgtccgcggtggacgccatcgccttcgggcgcggtccgggcgccttcaccggcgtgcgcatcgccatcggcgtggtccagggcctggccttcgccctgcagcgcccggtactggcggtctccgacctggcgatcctggcccagcgggcctaccgcgagcagggtgcggagcgggtcgccgcggccatcgacgcgcggatggacgaggtctactggggttgctaccagttgcaacagggcgagatgcgcctggccggcagcgaagcggtactgccgcccgagcgggtcgccgtaccgtgggacgccgctgccgcggactggttcggcgccggcaccggctggggctacgtcgagcgcatgccgcagcgcccggccgcgctggacgcgagcctgctgccgcatgccgaggacttgctcagcctggccggcttcgcctgggcgcgcggcgaaggcgtggaggcggaacaggcgctgccggtgtacctgcgcgacaacgtggcgacgccgaaaaaagcgccctgaaaatgccgcgcagcggtaattgccaagcctttcggggctggctagagtgtggagacttccccgggttttgatcatgcgtatcgacggtctttcttcctcttcgttgccgctggagcgcagcgcccgaccgggctccgcggtcacgccgtatcgcgacgtgcagcgcgaggtcgaggcgcggcgcgagcagccggcgccggtttccggcagccagggcttcgagcaggcgccgcaggcgcgcaaggtccaggccagttcggcgggcggcgacagcctgccggtcagcgcccgcgacctgctggcgttccagcgcccggtaagcagccatgcggcgatggccctggccagctacaactccaccgccagcctcaacatcgacgccggcgccgaggatgtcctcggcctcgacctctacgcctgagcggttccctgcgctcccgtggtttcccttccttatttcctcggttgtccatcctggaacgaggcggcctggcgcggcagcttctatccgcgcgaattgcgttctgccgactacctcggacactacggcggcatcttcaacgcggtcgagggcaataccaccttctatgcccggccttcggcggaaaccgtgcggcgctgggccgagacgatgccggcggggttccgcttctgtgccaagtttccccgcgatatcagtcacgaaggcgacctgcgcgaacggctcgaggccgccggcgacttcctcgaactgctggcgccgcttggcgaaagggtcagcccgctgtggctgcaactgtcggcggcgttcaccccgcagcgcctgggcgaactgctgtatttcctcgatgagctgagtccgcgacggattgccgtggaagtacgccacccggcgttcttcgacaaaggcgaggacgagcgcctgctcaaccgccacctgcgcgagcgtggcgtggagcgcatctgcctggattcgcgggcgctgttcagttgccgttcggacgatccggcggtgctccacgcccagtcgaagaagccgcgcctgccgatccgtccggcggccttcagcgatacgccacaggtgcgtttcatcggcggtcccgacctgccggccaacgaggtgttccttttgccctgggtcgacaaggtagccgactggatcgaggccggcctgactccatacgtattcctgcatacccccgacaatcacctggcggcccagcaggcccagcgtttccatgcgctgctgggccagcgcctgccaggcttgccggcgctacccgagccgatcccggccccggaagtggagcaactgggcctgctctgagcgcggcgctcgacgctccgccggcctgcgcctaggctagggagtcctttccccgccacggagcccgccgccatgaccagccaacgccaacgcgccgaacgtttccgcgacctgcaccaggggcccggcatgctggtcctgcccaatccctgggatgccggttcggcgaagatgctcgccagcctcggcttcgacgcccttgccaccaccagcgcaggcctggcgttctccctgggccggcgcgacgcggaaggcgcggtgagccggaccgaggcgctggaaaacgcccgggcgatcgtcgctgccaccgatctgccggtcgccgccgacctggaaaacggctacggcgatgctccgcaagactgcgccacgaccatccgcctggccgccgaggccggtctggtcggtggttccatcgaggatgccagcgggcgcgccggacagcccatctatgagttctccgccgcgctggagcgggtcgctgccgcggtcgaggcggcccgtgcgttgccatttccgttcaccctctgcgcccgcgcggagaacttcctgcatggtcgcgaggatctcgacgacaccctgcggcgtctgcgcgcctacgccgatgccggcgccgatgtgctctacgcgcccggtttgaaccgccgcgaacagatcgtcgcggtgctcgaagcggtggcgccgaagccgatcaacgtgctggtcggttcgccgcgcctggagctgtcgctggacgagctggaagccctcggcgtcaagcgcgtgagcctgggctcgaatcttgcccgggtcgccttcggcgctttccatcaggcggcgcaggcgctggcgcggcgcgacctggaagcgacccgtgcggcgatgcctttcgaccgtatcaacgacctgttccgctgaacccgtgcgccgcctggcctggttgctgccattactgctgctggcgggggccgtcggcgccctgcgctaccagtggttcgatctgccggcgcgctggaatccctggctgccgctggacgtgcgcgaaccgccgaacctgctgacccgctacaagctatggcggctggccgacgaccggagcctctgcgacgccgccctggccacctcgcaactgcgctaccagcgggtagccgacgacccgccatcggctacctgcccgttgagcaacagcctgcgcgtgcgtggggcggcgctggagttgagcagcagctttctcgccagttgctcgctggcggtgagctatgcgttgttcgagcggcacgtgctgcaaccggcagccctggacatctatggccagccgctggcgcgggtcgagcatgtcggcagcttcgcctgccgcaacgtctacaaccgcgaggacggtcggcgcagccagcatgcctcggccaatgccctggacatcagcggcttccgcctggccgacgggaggcggatccgcctggccacggactgggccggcgagagcgccgacgggcgcttcctgcaccgcgtgcgggacggcgcctgcgccagtttcaatgcggtgctggggcccgactacaacgccgcccaccgggatcacttccacctcgacatgggcctatggaaggtctgccggtgagcgcgtgcgggtcaactctggcaaaatccgcgctttctccgacgattgcccgaccatgaccgattccgccgctcctcgcctgcatgtccaagccctgtccgccgattgcgccgaggctgcgcggcgctgggcggagcggctcggcctgccgctggcggcggacgacgaggcggagttcgccgtgcaggtcggcgagcagggcttgcaggtcttgcaactgggggcggactcccccggtccggtgcgggtcgatttcgtcgagggcgccagcgcccaccggcgcaagttcggcggcggcagcggacagatgatcgccaaggcggtcggcgtccagccaggcatccgtccgcgggtcctggacgccacggccggcttgggccgggatgggttcgtcctcgccagcctgggctgcgaggttaccctggtcgagcgccagccgctgatcgccgccctgctcgaggatggcctggagcgcgcccggcgcgatcccgacgtggcgccgatcgccgcgcggatgcgtctgctcggcggcaactcggcggacctgatgcgcgtctgggatggcgaggcgccgcaggtgatctacctcgacccgatgtttccccatcgcgacaagagcgcattggtgaagaaggaaatgcgtctgttccggccgctggtgggcgacgatctcgacgccccggcgctgttgcaggcggccctggccctggccagccaccgggtggtggtgaagcgcccgcgcaaggcgccgatcatcgaagggcccaagcccggctatagcctggaaggcaagtccagccgctacgacatctatccgaagaaggccctgggcaagggctgagtgtcgacaccgcagggaggcggcgagcatgcagcagaccatcgattgtccgattcgccggcgcctggcgcacctgccctgggccaacgacgggcgtgccggtgtccgccactggctggagatgcagcgcgatccgctggcctggttgcagaagatgcacgtcgcgcagccggacctcgcggttgcccgcatgggcccgcagcgcctctggtgcctgttccatccgcaggcggtgcaggaattgatggtcgatcgccgcgatgacctgcaacgctggcagccggcgctgtgcatgctgaaacagtggaacgggcgcagcttcatgatgcgcgagggcgcccccgcccaggcccggcgcaaagaagtacggccgcacctggcgccgccgccggccagcgaggttcgccgcctggccgcggagtggggcgagcgggtggaggaggggcgcgaatacgacctcgacctggaaatggctgcgttcagcgtcaccctcagcggtcacgcgctgttcgacgtcgacctgcaaccgtcggcctatcggatcgccaaggcggtgcgcctgctgtcgcgggtggcattgctggaaatgagcaccggcctgccgctgggccactggttcccgagcaaactgtgcccgcgcaagcgctgggcgctgggccagttgcgcgaggcggtgggtgaggtggcggagcgctcgccgcggccgctggcggacctgcgcgatgaactctgcaccctgctcatggcgtcccaccagtccaccggcgtgaccctgacctggagcctgttgctgctggcccagcgtcccgagttgctcgcgcggctacgcgccgagctggcgcgagtgaattggacggcgatccgctcggtcgccgacctgcgcgattgcgcgctgctcagggcggtcctgcaggagtgcctgcgcctgtacccgccggcctacggcctggcgccgcggcaggtgacggcggacatcgaggtgttcggccagcggctgaagcgcggcgacgtgaccatggtctcgagctggatcacccagcgcgatccccgttggttcgaggcgccgctggagttccgtcccgagcgcttcctcgaaccggcgcgctggccgcgcggcgcctacttccccttcggcctcggcgaccgcgcctgccccggcaccgcgatggcgatgatcgatctggcggcggcgctggcctactgggtcgagcactgggacatcatgcacgacggcgacctggcgccgcgcggctggttttcgctgcgtccgcagcgagcgcgggtgcgtttccgccgtcgcgcctgagctgcctcagccgcccgcggcgaaggcgcgcaggaacagcgccaccacttcttccacgtgccgctcgccttcggcctcgtccagcggttcggcgcagccgatcaacagacggtaattggcgcagcccttgaccagcatgaagaagtgttcggcggcgtggcgcgcgtccgggaacgccagcttgccgctgcggcgggcctgctcgaggaggcgttccatctcgtcgatcacctgcttcggcccggcctcgaagaacagctcggaaagcttggggttctgcccagcctgcgcggccatcaggcgggtcagggcgatcgcctcgtggctgttgatcagccggtggaagccgcgggcgatattcagcaggaccttttccagtggcgcgccttcggccagctggaagtacagggcgggaagctgctcggcgcacttggccttcaccgcttcgctgaacagggtttccttgtcggtgaagtggctgtagacggtgagcttggaaacgccggcttccgaggcgatggcttccatgctgctgccgtcgtagccgttgcagaggaacaggcgcttggccgcctcgagaatggcttcccgtttggccgggtccttgggccggccgggaccgacggaggaggtgggttctgacatgcgcttatacaattgaaatactggactgatgggttctgtatttttactataccgcccagtataagaactcgaacgcagtttgcggaaggtgtcacatgtaccgccatatcccgctcgtcgccctgtccctgttttcctccctgttcctcgccgcctgcggcaacggcacgccgccgccagccgcggcgcgtccggcgatcgtcgtccagccccagccggcgggggaggtgagccaggcctttcccggcgagatccgcgcccgccacgagccggagctggccttccgcatcggcggcaaggtcatccgccggctggtggaagtcggcgagcgggtaaagaaggaccagcccctggccgaactcgatccccaggacgtgcgcctgcaactggaggcggcgcgggcccaggtcagtgccgccgaggccaacttgcagaccgtgcgcgccgagtaccggcgctaccgcaccttgctcgaccgcaacctggtcagccattcccagttcgagaacatccagaacagctaccgcgccggcgaggcgcggctgaagcagatccgcgccgaattcaacgtcgccgacaaccaggccggctacgccgtgctgcgctcgccccaggatggcgtgatcgccagccggcgcgtcgaggtgggccaggtggtggcggccggacagacggtcttcagcctggccgccgacggcgaacgcgaggtgctgatcggcctgccggaacgcagcttcgaacgtttccgcatcggccagccggtgtcggtcgaactctggtcgcaacgcgacagacgcttcgccgggcatatccgcgagctctcgcccgcggccgatccgcaatcgcgtaccttcgccgcccgggtggccttcgacgaccgcgcgactccggccgaactgggccagagcgcgcgggtctacgtcgccgccgccgaggcggtgccgttatcggttcccttgtcggcgctgaccgcagaggccggccaggcgttcgtctgggtggtcgagccgggcagctcgaccctgcgccggcaggcggtgcgcaccggtccctatgccgaggaccgggtgccggtgctcgaaggcctgaaggctggcgactgggtggtggccaccggggtccaggtgcttcgcgaagggcagcaggtgcgtccgatcgaccgggccaaccgcacggtgaaactggcggccaaggagtagtcgcatgtccttcaacctttccgcctgggcgttgcagaatcgccagatcgtcctgtacctgatgatcctgcttggcgcggtcggcgcgctgtcctacagcaagctggggcagagcgaagacccgccgttcaccttcaaggccatggtggtgcagaccaactggccgggcgccagcgccgaagaggtggcccggcaggtcaccgagcgtatcgagaagaagctgatggaaaccggcgactacgatcgcatcgtgtccttctcccgccccggcgtctcgcaggtgaccttcatggcccgcgaggacatccattccagcgagatccccgaactctggtaccagatccgcaagaagatcagcgacattcgcgccaccttgccgcaaagcatccagggcccgttcttcaacgacgagttcggcaccacctacggcaacatctatgcgctcaccggcaagggcttcgactacgcggtgatgaaggactatgccgaccgcctgcaactgcaattgcagcggatcaggaacgtcggcaaggtcgagctgatcggcctgcaggacgagaagatctggatcgacctgtccaacaccaagctggccaccctcggcctgcccctggcggcggtacagaaggcgctggaggaacagaacgcggtggcctcctccgggttcttcgagaccgccagcgaccgcgtgcagttgcgcgtttccgggcgtttcgattcggtggaggagatccgcgacttccccatccgcgtcggcgaccgcaccttccgcatcggcgacgtggctgaggttcgccgcggcttcaacgatccgccggcgccgcgcatgcgcttcatgggcgaggacgccatcggcctggcggtagcgatgaagccgggcggcgacatcctggtgctgggcaaggccctggaaaccgagttcgcccgcctgcagcagtcgctgccggccggactggaactgcgcaaggtgtccgaccagccggcggcggtacgtaccggggtcggcgagttcatccgggtgctggccgaggcgctggtgatcgtcctgctggtgagcttcttctccctcggcctgcgcaccggcctggtggtggcgctgtcgatcccgctggtgctggcgatgaccttcgccgccatgcattacttcggcatcggcctgcacaagatctccctcggcgccctggtgctggcgctgggattactggtggacgacgcgatcatcgcggtggagatgatggcggtgaagatggagcagggctacgaccgcctcaaggcggccgccttcgcctggaccagcaccgccttcccgatgctcaccggcaccctgatcaccgccgccggcttcctgccgatcgccaccgcgcagtccggcaccggcgaatacacccgctcgctgttccaggtggtgaccatcgccctggtggtctcctggttcgccgcggtggtcttcgttccctacctgggggccaagctgctgccggacctggccaggttgcacgcgcagaagcacggcggcagcgccgatggctacgatccctatgctacggccttctaccagcgcttccggcgtctggtggagtggtgcgtgcgctaccgcaagacggtgatcgtcctgaccctcgccgccttcgtcggcgcgctgctgctgttccgcctggtgccgcagcagttcttcccgccctcggcgcgcctggagctgctgctggacatcaagctggcggagggcgcctcactgcgctctaccggcgaggaagtccagcgcctggaaaaaatgctgcagggccatgacggcatcgacaactacgtggcctacgtcggcactggctcgccccgcttctacctgccgctggaccagcaattgccggcggccagcttcgcccaggtggtggtgctggccaaggacctggagagccgcgaggcgctgcgcaagtggctgatcgagcggatgaacgaggacttcccgcacctgcgcagccgcatcagtcgcctggagaacgggccgccggtgggctatccggtgcagttccgggtttccggcgaggacatcccgcaggttcgcgaactggcgcgcaaggtcgccgacaagatgcgcgagaacccgcacgtggtgaatgtgcacctggattgggaagagccgagcaaggtggtgtacctgagcatcgaccaggagcgcgcccgtgccctgggggtgagcaccgccagcctgtcgcagttcctgcagagcgcgctgaccggctcgcacgtgagcttcttccgcgaagacaacgagctgatcgagatcctcctgcgcggcaccgagcaggagcgtcgtgacctgtcgttgctgccgagcctggcggtgccgaccgagaatggccggagcgtggcgctgtcgcagatcgctacgctcgaatacggcttcgaagagggcatcatctggcaccgcaaccgcctgccgacggtcaccgtgcgcgccgatatctacgacgattcgctgccggcgaccctggtcgcgcagatcgccccgaccctggaaccgatccgcgccgagctgccggacggctacctgctggaggtgggcggcacggtggaggacgcggcgaagggccagagttcggtgaacgccggcgtgccgctgttcatcgtggtggtgttgagcctgctgatggtgcagttgcgcagcttctcgcggatggcgatggtattcctcaccgcaccgctgggcctgatcggcgtgaccctgttcctgctgctgttccgccagccgtttggcttcgtggcgatgctcgggaccatcgccctggccggcatgatcatgcgcaactcggtgatcctggtggaccagatcgaacaggacatcagccatggactggatcgctggcacgccatcatcgaggctaccgtgcggcgtttccggcccatcgtgctgaccgcgctggcggcggtgctggcgatgatcccgctgtcgcgcagcgtgttcttcgggccgatggcggtggcgatcatgggcgggctgatcgtcgccaccgtgctcaccctgctgttcctgccggcgctctatgccgcctggttccgcgtgaagaaggacgaggcgcgggcctgacgggagaaggggacggggcgatcgcgccccgtccgtcggctcacctggccgcgccgaagaccttcttggccaggccggtggcggcagccgccgggttctggcggatgctcttctcctgcctggcgatcatctcgaagagcccgtcgagggcctgctcggtgacatagccctcgacgttggcgctcttcgcatcgaccaccccaagggtcgccgcctggctggcgaaggcgttgtactgcttgaccaggccgacctcgtcggtggcctgcttgacgatcggcaggaacttcgcgcgcagctgttcgcggctggacttgtccaggtattcggtggcggcgtcgtcaccgcccttgaggatgcccttggcgtcggccacggtcatcttcttcaccgcctccaccagcaggccctgggcctgcggcacggcagcctcggcggcgcggttcatgctcgcctcgagctggtcgacctgggcgcccatgccgaactgcttcatcagcttcgccgccttgcccagcttgccgggcagttcgatgcgcacgtccgggttgttgttgaagccgcccggctggccaagctggcggacggcgatctgcgcgccctgggtcagggcgtccttcaggccgctggaggcgtcgttctgcgacaggtcggcgagggacagggcgagggcgttggccgagagcagcaggccggcgcagagggcagtgagtcggaacatgacagcgtccttgatgtggaacgtacggggtatccggccgctcgtcgtgaggtggatcggcaaccggtagcgaataggaggtggagtgtactggagggaaccgccggttcgcaccggcggcatgccgcggtgtgcttcagcgcgccgattcgacctgcacgcgatagggctgcgggtcgctgccgtcgagtttcaccgagtggcgggtggtgttgatgaacagcaactggccgttcagctcgatgcgcgcgctcaccgcatagctgtggcccggcttgacctgcttcgggtcgtactccaggtggaacgccagcggcacctggctggtgatctcgcgggtctggctggccaactgcaccgagggggcgtcggccagggacacgtcttccaggctcacgctcaggcgcgccgagggcggcagggcgatacgctcgcggtagaagacctcaccatcgaagctggcgttcgaagtcgattgctgggtaccgcagccggcgagaatgctggcggcgagcagcaatggcagttttttcatgggagcctcctttcagacggaacaaaaaaacgagcgggcctctgacccgggaaaccagcataggttgccgggccggaacagggaaaggtcgcaggatatttcagcggagcgacgcccgtccctcgcggggcgggcgccgggcttcagttggcggccgcgtcgttgctttcggcggcggcttcctcggcggggcgctccagcgccacctggcggatcgacagacggatctccgccggcagcacgcgcttggcggcgccttcggccagttcgccgagcagttcgtggtagctcagcttgccggcctcgtccttgcgcagcacgcgcaggtcgagaagggtctggatgaagtggcggaacaggctcttgtcgaagaactccggggcgttcaggccatgcaggatcgacaggcgctgggccatcacggtgcagaggttctccagttcctcggcggtcagggcgttctgcccggcgttgagcagcagggcgatggccatgtagaagcgctgcagggtctgggtcaccgaacgagcgaggaggatcagcagcacatattgccgcgagcttggcgccgggcggatgaaggtgtcgttctcctggcgcagcaggtcctgttccaccagggccgccagccactggtcgatcaccgcgtcgagttcgtccaggctccagcggatgaacagttccgcctgcaggtagggatagagcgcgcgggcgaagcgcagcaactgttcgcggctgatccgcgagttgctctggaagaagctggcgatcagcgccggcagggcgaagacgtggaggacgttgttgcggtagtaggtcgccagcaccgcgttctgttcgtcgagatagaggatgcggcccagcgcgtccttctgctcggccagcaggttcatgctcttcacgtattcgatcagggcctggccgtcgccgtccggcagggtcgcgctgggcgagtagggcaccttgcgcagcagcgccaggtagaggtcgaggattcgcgccagggcgctttcgtcgagggcctggcgactggtggagagcagcgccagggcaaccaggttgaccgggttgatcgccgccgcgtcgttgaggtggcgggcgacgtccttggccagcaggttggtggtctgcggcagccagtcggggcggtattccgggccgaggtcctggtcctgccagtcgggctggtggcggtcgaggaactggtcgagatggatcggctcgccgaagttcacccagacctggccaaaacgctgcttcagggcgccgaccaccttgaacaggtcgaagatcgactccttcttcttggtcgcgccgcgcagttcgccgaggtaggtgcggccttccagcacgcgctcgtagccgatgtagaccggcacgaagacgatcggccggcgcgagtcacggaggaagctgcgcagggtgatggcgagcatgccggtgcgtgggtggagcatgcgcccggtgcgcgaacggccgccctcgacgaagtactcggtggagaagccgcgggagaacagggtgtgcaggtactcgttgaacaccgcggtgtagagctggttgcccttgaagctgcggcgcatgaagaaggccccgccgcggcgcaggatcgagccgatcaccggcatgttcaggttgatcccggcggcgatgtgcggcggggtcaggccgttgcggaacagcaggtaggagagcagcaggtagtcgatgtggctgcggtggcagggcacgtagacgatctcgttgccctgggccacgtcctgcacccgctcgatgtggttgaccttgaccccttcgtacagcttgttccagaaccagctgaggatgacttcgaggaagcggatcaccggataggagaagtccgaggcgatttcattggcgtagcgcagcgcgatgccttcggccttctcctgggatatccgttcgctctcgcattcctcgctgatcgcctggcgtaccagcggcgcgcgcagcaggcccttgaccaggttgcggcggtgcgacaggtcgggaccgatcaccgcggtcttcaggttgcggaagtgcacccggaggatacggttgaccatgcgcagcgtgcgctcgtggcccttgccctgttccaccagctcgcgcaggtggatcggcgcggagaactgcacacgggtcttgcgtccgaggatcaggatgcgcgccagcttgcgcaggcgcccggtgaccgcccagttgtcggcgaacagcagcttccaggggctcgattcgctgtccggcgattgtccccagaacacgctgaccggaatgatctgcgcgtcgtcgagaccgttctggccgaccgcggcgagcatgcgcaccagggtcggcgaggcgccgcgcttatcctggcggccgagccagtcgggttcgggcgtcaggtagaagaacgccgccggctcgatggcgtcgcctaccgctaccggcatcaccggacgcggcagcccggccttgcggcattcggtatccactaccgcgagatcgctgaccgaaggctgttgcagcacgtagagcaccggcttgctgcggtcgatcttcagggtgaaggccgattggttgatggtttccgagcgtacccagaggtacagcaggcggcgcagggcgccaaaaccaaagcggcggaaagggtagcggggcatacggtgtctactggcagttgatcgggacccggcgtgacgggcgcggctagtttgccgcaatccccggagggccgcaaaagaacgcaacgcgtcctacggcgaacggcggcgaacaggttgcgaatgtagaaccttcggcaggcgttcgggttctgtcacgttttgccaaggttctcccgatgccccgtattgccaggcggcggggcgcttcggctatagtccctgcgcgtttttcgcggccctggccggacatggcggcggccgccggaacaggtaggggaccatgatcgaaacaagaaacctcggcaaacgcttcggctcgcgggtggcggtggacgacctgtccttccaggtggagacgggagaggtactgggcttcctcggtccgaacggcgccggcaagtccaccaccatgaagatgctcaccggcttcctggcgcccagcgtcggcaccgcgagcatcttcggcttcgacatccgcaaccgcacgctgcaggcgcagcggctgatcggctacctcccggaaggttcgccctgctacgcggaaatgaccgtgcagggcttcctcgatttcatcgccgagatccgtggctaccgtggtgccggcaagcgcgagcgggtcgcccgggcactggggctgctggaactggacgaggtgcgccggcagaccatcgaaaccctctccaagggcttccgccggcgtgtcggcctggcccaggcgatcctccacgaaccgcgggcgctggtgctcgacgagcccaccgacgggctcgatccgaaccagaagcaccaggtccgcgagctgatccgcggcctcgcgcaggagcgcatcgtgatcatctccacccatatcctcgaggaagtctcggcgctatgcagccgcgccctggtgatcggcggcgggcggctgctggcggacagcacgccgctggaactggccagccgctcgcgctaccaccaggcggtgacgctctacagcgacgaccccctggataccgtggcgctggcggtgctgccgggcgtggcgggcatcgaggagaaccccgccgaaggcagcctgaccgtcctggcgcagccgggcgcggtgatctttccccaggtcagcgggctggtcgccgagcgcggctggcggatccgcgaactggacgtggagcgcggccggctcgacgaggtattccgcaacctgacccgggggacggaggcatgaagcaactgccggtgatcttcaagcgcgagctggcgagttatttcgccacgccgctggcctatgtgttcatcgtgatcttcctggtcctggcgggcgtgttcaccttctacctgggcaacttctacgaacgcaaccaggccgacctggcctccttcttcgccttccatccctggctctacctgttcctggttcccgcgctggccatgcgcctgtgggcggaggagcgcaagtccggctcgatcgagctgctgatgaccctgccgctgacccgcttcgaagccgtggccggcaagttcctggctgcctgggcgttcgccggaatcgcgctgctgctgaccttccccatggtgctcacggtgaactacctgggcgagccggacaacggtgcgattctcgccggctatctgggcagttggctgctggccggcggctacctggccatcggttcgtgcatgtcggccctggcgaagaaccaggtgatcgctttcatcctcgccgtggccgcctgcttcctgttcatgctcagcggctttccgctggtgctcgatgcgttcagccagtgggcgccgcagtggttgctcgatgcggtggcctcgctgagcctgctgacccgcttcgatgccgtcagcaagggcgtcatcgacctgcgcgacctgctgtatttcgtcagcctgatcgtcgcctggctggccgccacggcggtggcggtcgacctgaagaaagccgaatgagggggagtcgatgaaacgcgtgttgtcctctggcgccgggctgttgctgatcgcgctggcgttcctggccttcaacatggtctccggcctgctgttcagcggcgcgcggctcgacctgaccgagcagaagctctacaccatcagccccggcaccaagcggatcctggccggcctcgacgagccgatcaacctgtacttcttctattcggatagcggtgcccgggaactggtgccgctgcgcaactacgccaggcgcgtcgaggaactgctgcgcgcctacgagcgcgaggcgaacggcaggattcgcctgcaggtgatcgatcccgagccgttctccgagaacgaggacaaggccaccgagttcggcctgcaaggaattcccctgcagcagggcggcgacaacctgtacttcggcctggccggcagcaacgccctggacggagtccaggtcatacccttcttcccgctcgatcaggaggagttcctcgaatacgacatcagtcgcctggtgcagaccctggcccagccgcagcggccggtggtcggcctgatgtcgtcgctgccgctcaatggcggcttcgacatggccagccggcagccgacctcgccgtggatggtcatggaggaaatccgccagcaattcgacctgcgcagcctcaagagcgatgccacggaaatcccgccggaggtctcggtgctgctgctggtgcatcccaagcagttacccgggcagacgctatacgccatcgaccagttcgtcctgcgcgggggcaagctgctggcgttcgtcgaccccttcagcgaggccgacagcggcagcgatttcgccgctacgctggatggcgacaagtcgtccgacctcgcgccgctgttcgaggcctgggggctgcggctgctgccgggcaaggtgctcggcgacggcgcctatgcgatgtccatcagtcttggccgggaccagcgtccggcccggcatccggcctggctcagcttgccgcgcgaggcgctggaccaggacgacatcgccactgccggcctggaaagcctgaccctggcgacgcccggcatcctcgaaaggctccccggagcgagcaccagcttcacgcctttgctgcaaagctcggcccaggcgatgccgttcgatgcctcgcgcttcggcctgctgcgcgaccccggcgatctgatgcgcgagctgcgcccgagcggccggcggcatactctcgccgcccgtatccaggggccggcgaagagtgccttcgcggagggcatcgaggggcatcgcgaaggcctgaaggaggcgcgcaacatcaatgtcatcgtcgtggccgataccgacctgctcagcgatcgcatgtgggtccaggtgcaggacttcttcggccagcgcgtgccgcagccctgggccgacaacggcgcgctggtggtcaacgcgctggacaacctgtcgggcaccgacgcgctgatcagcgtgcgctcccgcggccggttcagccggccgttcgtggtggtcgagcgcctgcagcgcgaggccgagacgagcttccggcaaaaggaggaccagctcaagcagcgcctcgccgataccgagcagcaactcgccgccctccagcagggtgccgacccggagaaggccgtcgaactgacgcccgaacagcaggccacggtgcgccagtacatgcaggagaagctgcgcatccgcaaggagctgcgcgaggtgcagtaccagttgaacgccgatatcgacgcactgggccgcaccctgaaactggtcaatatcgccctggttccctcgttgctcacggtcggcgtgctgctcggctggctctggcggcgccggcgcatggcccggggagggcattgacgcatgcggcgcaatacgctgatcgtcctgctggcgctggtggcggcgctggccggaaccttcgcctggctgcagcgcgagcgcgcagccgaggtacctgccttgccggcggcagagcgctggctgccggaactggacagcgcgacgctgagtggtctgcacatgcagtttgccgacggttcgccggatatccgggtcgagcggcgtgcgggcgcgtgggtcctgccggccaaggccgactatccggccgaccggctacgcttgtcggcgctgctcgaggcgttggcagaggcgcgcaaggtcgaggcgaagagcgccaacccgaagaaccacgcgctgcttggcctggcggagcgtggcgaggggcaggcgctacgcctgagcctgcattggcagtccggcgagcctctggtgctgctggtgggcaaggatgcgcagcatggcggtagcttcgtacgacgactgggcgacccgcaggcctggctgattgacaagcgcctgccgttgccgaacaacgagctggagtggctcgaccggcggatcgccacgctgcccttcgcccgggtgcgcgaactgcaactgcgctatccgaagggcgagcgcctggatctctatcgcgacgacgccgggcagccgaacctgcaagttcggcaattgcccacagggcgcaagctggcctatgaggcagcggccaacggcgcggcgacgctgttcgccgacctgcgtttcgccgatgtagcgccgctggcgcaggtgggattcaggcaggcgccattgctcctggcgttcagcctgcggacgttttccggcgcgcgcctggatggcgagattcggcgccagggcgagcaatactggttgttgccgaagagcgtcgagggcttcgccgagggcgaggtcgccgcccatcctgactgggcctatcggatcgaagaggaccgctaccgcgccctggcccggcacctgccggagctgctggcgcgctgagcgggctcagccggcggtctggccggccagttcgcgcatgcgttgcagcacggcgttcaggccgttgctgcgcgagggcgacagttggcgggaaagacccaggcaggtgaaccagtcgttgaggtccaggcgcgccagttcgcgggtctcgatgccgtcgacccgtgccagcagcaccgccagcaggccgcggatcaggcgcgcgtcgctgtcggcacggaagcgccagtggccgtcgcgctgctcgccgagcagccagaccaggctttcgcaaccgtgcacgcgatgctcttcctggcgttcgtgttccgcgagcggcgccaggcgctcgccccattgcagcagcagacgcgcacgctgttcccaactggcggtgtgaccgaaggcgtccagtgcctcctgggcctgttcggggagaaccgggttcatcgcagcaactccagtgagcggtcgagggccaggaagaagcgctccaggtcgtcggcatcgttgtacaagcccagcgagacacgcagggcgccgggtacctcgaggcgttgcagcagcggcatcgcgcaatggtggccggcgcgcaccgcgatgccctgttcgccgagcaggtgggcgagatcggcgacgtgcacgccgtcgacgcagaagctggccagcgccgcctggggttcgccgagcaggctgacgccgtcgcgcgccagcaggccggcgagcaggcgggcgtggagggcgccttcgtgggcggcgacttcggcttcgtccagggtggccagccagtcgatggtcgcgcctaggccgatcgccgcggaaaccgccggggtgcccgcctcgaagccgagcggagcggcatggaagctggcttcgtggaagccggtgtggcgtaccatctcgccgccgaactgccagtgcgccagttgctccagggcctgtgggcgaccccagagcacgccgatgccgtcggggccgtagagcttgtggccggagaatgcgtagaagtcgcagcccaggcccggcaggtcgtggcgtccgtggacgctgccctgggcgccgtcgaccagggtccaggcaccgcgctcgcgggccagctggatcaactccaccaccggttgccaggtgccgagaacgttggacaactggctgatcgccagcaggcgggtacgctcgccgatgatatggcgggcctgctccaggtcgatcaccccgcgctcgtccagcggcaacacgcgcaggaccaggccgcggcgcagggccaactgctgccagggaagcaggttggcatggtgttccagggcactgaccagcagttcgtcgccaggccggaaatgccgctccaggccataggccaccaggttgatcgcctctgtggtgccgcgggtgaacagtacctcggccgggttgccggcgtgcagccagtgggcgacgcggctgcgcgcggcctcgaaggcccgggtggcgcgctcgccggggacatgttgggcgcggtggacgttggcggcgccgccgaggtagtagccgttcagggcgtcgagtacggcctgtggcttctgggcggtggcggcgctgtcgaggtaggtcaggccttccgcggcgaaggcggaaaaggccggaaagtcggcgcgccagggagacggcagggacatggcggacactgtgcgaggacggttacaggggaaagggtagcgcacccggcggcgctggcgagcaccgtcgggcgagcggggaggcgagctgggctcagttgtgcgcgtgcagcgcttcgttcagctcgatggcggtcttgttggtcttgcactccaccgcaccgttctgcgagttgcggcggaacagcaggtcgggctgaccggccaggtcgcgggccttgaccactttcaccagggcgttctgctcgtcgagcagggcgaccttggtgccggcggtgatgtacaggccggcctcgacgatgttgcgatcgcccagcgggatgccgatgccggcgttggcgccgatcaggcagccttcgccgacgctgatgacgatgttgccgccaccggaaagggtgcccatggtcgagcagccgccgcccaggtccgaccccttgccgacgaacacgccggcggatacgcggccttcgatcatgcccgggccttcggtgccggcgttgaagttgacgaaaccttcgtgcatcaccgtggtgccttcaccgatgtaggcgcccaggcgcacgcgggcggtgtcggcgatgcgtacgccggccgggaccacgtagtcggtcatcttcgggaacttgtcgacggagaagacttccagcagcttgcccttcagtcgcgcttccagttgcagttcggccagttcggccaggtccaccgcgccgatgttggtccaggccacgttcggcaggagcgggaagatgccgctcaggttcacagcgtgcggcttgaccaggcggtgggagagcaggtgcagcttgaggtaggcctccggggtggaggacggcgcggcgtcttccgccaacagggtggcgaccagcggcttctggctttccgccaggcgcgagagcagggccgactgagcggcgtcgatacccttcagggcgtcggccaactggtaggcctgctgcgaagtgaaggtcagcgcctggttgccggctgcgtagccaaggatcggtgcgacggcggcgacgatttcgctcgaaggcttgagcagcggcagcgcgtagaacacttccagccaggcttcctggcggttctgggtgccgacgccgaaggccaggctgaacagggattgcgacatgtgggtttcctcgaaacggagtggaacggtcaggccggacggcggctgagcagcaggcccagtcccgcgctgccgagcagcgcggcgcaaccgcggttgaacagacgccgggcccgctggccggcgagcagccggccgaggtggagcccggcataggaataaagagcgatggccagccattcgagcagcaggaatgccgctccgagctgggcgaactgggcgcccagcggttggccgggatcgacgaactgcggcaggaaggcggtgaaaatcaggatcgccttcgggttgcccgccgccaccaggaactcctggcgccccaggcgccagaggctgggacgcgccgggctggcttcgttcgccagtggctgcgcatcggtccgccacaattgcaccgcaagccacaacaggtaggcagcgccgagcaccttgatcgccaggaacagccaggccgaggtgtgcagcaccagcgccagcccggaggcggccagggcgagcatgccggcgaatgccagcaggcgcccgccgccggccagcgaggcggtggcgaaaccgtgccgggcggcgttgttcagcgacagcaggttgttcggccccggcgccaggttgagggcgaagcaggcgggtacgaacagggcccaggcgacactcatgcggcctcccgctcaggccagggcggcggcgtaggcgtcgggcttgaagccgaccagcgtcctgccgcccagttccagcaccgggcgcttgatcatcgacggctgggccagcatcagctcgatcgccttggcttcgtcgagatcggccttctgcgcttcgtcgagcttgcggaaggtggtgccggcgcggttgaggacggtttgccagccgtgctccgcgcaccagcgccgcaggtgttcgcggtcgatgccgacggccttgtagtcgtggaagtcgtaggcgaccttgtgctcgtcgagccaggtccgagccttcttcatggtgtcgcaggctttgatgccgtagagaacgtaagtcattgtttttcctttggggttttggctcctccaaaacccctccaatattcctctaaaattctcgccagattatgccacgtcgatccactcggcgccccggctgtcccggtagagatccgtcatcttcgcggagcggtggccgagcaggcgttgcgcatcgcgcccttcttcttcatgaagcctggcagccagggatcgcatctcatggaagcttggcgggctggcgccgaaatcgagtccatgcttcttcgccgccctgtccctcgcatcagcgaacgcggcgcttatggtgtccagcataatcggctgcccagccttggcgcgactgatggtgcggtgatgatggatcatgtagcgggaaagaaccctcccgcggcatgatttgatcactgaggccagatcgagaccaaggacagccagtccgatcgacgtgcttatacgaaggcgcatgcccgtcttcgactgaacaacctgcaggtatccgtcctgctcgtccttgaactgcattgctgcaagatcctcccgcctctggccggtaataaccgccagttccatggctcttttcaaccagggctgtttcgcctcggcatagatcagacgccatgtctccagggtcaagcgctcgcgcttgatcttcacccgcgccgccttcgtcacctccaccgggtttttgtcagtccatccggccgccatcgactccatgaaaacatcacgcagaagggatcgcatggctcgggccatttgtgccttcccttccttcgccatctccgagaagtagccggccacatcaatggtcccgatatcccggatgtccatcgttccgaacctggcgcgcagccgtttcaggcgcatccgagtattacggacactggccgccgccaggccgcgctcgacgtagatcttttcatactcggtgagccagtcgtcaaatagccgcggcggacgtgatggctcagaactgagcctgtcggcgatagtcggctgaagcgattccgtgtggtttgcttcgatcgcttcccgaatcgcgcgggccttgtcctttcccaggccgaacatccggccgcttactggatcccgataggcgtagtaggttacgcctgaccgagagtccgtcttcttgtacaggtttggggggaggtcttttgacccctctttacgcggccttggtgccatggcgtgcgctctttatgcgggatatcagactttcgccaggttctgagcgtttggcaggttcttgactgctgtactccgcatcctggctcacgtagtagcttcgaccatgcttcacgggagcagggataatacagccatcccttgcccacctgcggagggtgttgatactcggcggcgtcctgaagtgctcagccgcccattcttctagggttacgagtttcattggacaatacctccccgccctgctggcgctggtcgggaaaatggttttcggggactggcagcctatcggctaccgtgcggttagaacgagcagccccattgcagggctgcgaatgctggcgctagctcgatcactgcgtgtagcgcgaccaggctggcgccaatgacggctactgccgccatgcgggagagagctttcttcatggtggctccggatcagtcgcccgcagctttggcgatcaggtgcatgagcatttcgcgcagttgctcgcgctcgagcacctggccggtctttgcgtactcgtcggcttggctcaggatcgcgtctatctcgatgttgagcatcggcgagagaacgtctggctcacactgctcgagcagcaactggactgctcgggtcgggtgcgccatcgctacgccgagccagttgtaagctgacgcggtgcggtagtagcggaggccggcgatctcatgccggcgcggcgggcggaagggtttcgtgcgcatattcaatccgggtagtgggtagcccattatccgaattgctgtatatacgtacagttgttggcgatgggtggctacgcaacgtcctgatggagcttcgtgcgtcgccacttctgaaccgcttgccctatatcttcctgggtgaacgttgccccgctgaatttccagacaaggcatccgtcaattgcatcgcactcagttaatacagagccgcacggcatcttgatatcaactggttgtagaagcatatcggtaaaatcttcaggatctgcatccatccaccctccgacataccgcgtaacctcggacacaacatcttccacttcgaaatcccttcgagaccagcctagcgcagcgacgatcgcgcgaaccccgcgctcccaccgatcctttcgtacaagcgcgccgtcctggcggaactcgtaatcttcgaccttggcgtcacgaaactccggtctgcgaaaatccagttcagttacctctctcattgcttccctccttcctgctcgctcagcagggcgcggagttccggcgttacccgacagcattcagccgggaacgaggtagaccaggcgcaggcgcagtactcttctgggccgcggcacggctcgttcatcacctgcttggcgatcagcccatggcgttcagcgctttcctgtatttctgccccatcgaaactaccgccctcgagggctccgcagatgatctcgcgcgcgaacttggccatcccctgcacaagcccctcgctgaccgtcataccgttgatgcgcgccagttcgtcgaggcaggcgttccagccgctattacgattcagccctgggactccggcatttaggagttttcgctccggcacaacagccacccttgcgcgcagttccgctagttcagcgcgaagttcctcgatctccatctccattccgccgcattgctggcgagcagcatctccctttgctgctgcgtcctcagccatggctagcttggcagctagggcgtcgtagtcggaggccatcacccacgccccttcgctggactcaacatgttcacagtcatcaatgtgagcatggttcacatggtcgaaccgcttcacctcactcatgacctacctccttgccgggcgcggcggcgagtagccgttcctgagccttcttcgagtgatgtgcgatgcagagcgacgttcctgggtgcgccgtgttacagcatccggcgtgctcacaggagcgtttttcgctgggcgcagcggcgggcagcttaatcacggtcccagccgggtagtagctgtgcgaccgcatgtcggggaaggcatgtgcgttgatgtcgcgtatctcgacccaacggctctcgtccttcaactgccgcagggcaatcccggcaaggctttcggctggttgcgtggtgtagctcacataagccggcacgctgtgctgagccgagttgccgggcgcggcggcgatgtacgcatccagcagcttctgcgtatcggtgcgggcgacgcccttgtacagcagcgccatcacggcatcgtgcattgcctccgtctcgcgaaccgggatcagggcataaccctccggcacgctgtgctgagcctgggcgctatccccggaggccttcacgcatgacttgatcgacgccagcagatatgaccatgcgaaaccgcgctcttggttcggacgcaaaccgagcgcacgtgccacgtcatcgcgacactgtttgtccaggtctttgatttgctgagcctgggcgcagtgcctagatcgcttgccgttgaactcaggatcacagcctaggttgcaaggctcccagtagggcagcggttcgtgctcatccccgcctgcctgctctaccgcaggatgtgccgggcacggatggacgagggagccgtcgccagaagggcaggtgcattcattcgctttgttcatgggagctttctccaggcctcggtttcgaggtcagaaacggttatcagtcggcgccggcgctcgatgttttcgagttgaatgacattgcccaggctgtcgatgacgacccagtgaatgcctgttgggaggtggatatatcgggctggcgcgggggagcagagggcctttatgcggcggtatgcggcgttttcgtcgaatgacatggcgggcaggctccgtaaggtggtgctgtgtagcagtgctcaccgctggcgccctggtctgcgtcgtttgcgatctcgttgagctggcgcgcgagctggcgcagttgagcggaggagagcagggcgccgaggcgtgggaggccgttgacctcggccaggcgctggccatcctcgccgtccaggaacagcgcggtcaggttgagggtgtgcatggcgtttcctcgggaggccggcaccggatgcagttgcattgcccgatgcgctggcctgttgtgcggcagtagacgggggcgttcacggaaggagactctccccgacctgccgggcatgcttgaggctgacggccctgatgcgcgtccagttcttcccccagtcctccgtcaggccgccctggtcgcggaagaagggaccgtgattcacgaacacggcgccgccgccgtggcgcatgacgaagtaggtattgtcgtcgatcggctcgtccgctcggacgtgttcgatcgccttgtcggccggcgccgtgcgccagtccggccaggtgcgcgcctcgttcttcgtctgctttgcgaccagggcgtcgattatctgcgccggagtggcgccggtgcgccaagccccgtcaagggccaggatcacaacgtcgatccactcggccaggtcgccgggggcttcctcgatctcgcgcagttccttgcggatgtggtcgacgacgccggcggcgcgcgaccctggcccgaacgtgcgttcgctgaaccggcgctggcgatggaggtgcaggtcgaaacggaacacgtccaggcgcccccgggcgcggccaagcgcgtaggcctcgtcctggaacatcagaaggtgatcgctggtgcgtccggtcaggacatcgagatagcggctgtggagcgcttcaatggcaaggtgatcgtcagggtggttctggttcgttgtcatggcggagttgttgttttctgcggacatagggaatacctctcgcttgctggcgctgatcagttggaaagggcttgctttgcgatctggagcacgtccatcccgatgcctccggtagagacgtcggtgagcgctgcgatctgctcgagggctttacgtgcggttgccagttggtcctctggggacttgtaggcgggcatgcctgccaggcgccggcacacgaacggatcgttgtcgcttggtatcgagcagcaggtgaattggattgcccggcacttgcagacgaaatcaggctccgggatggcctcggcgtcgacgacgtgcatgccgagtgtgattgccaggttgcgctcgatgttcgcgccgccggaccgctcccacccagggagcaacgcgagaatgtcgcagtccatgagtcgcttgatcccgtcgcgcatgaaggcctcccacggcgatccgcggtagaccatgttgacggctgggttctcgacgatatagccgagggcgcggatccgcttctcctcggcgttgaacgcagggtagttgaaatcggggatgccggtcatcggacccgcaagatagacgcgatgcatcatgcgatttgctccttggcgtctctaaagatatcgagctgcgcctctgcctctgctgtttccattgcagcggcggtgacgcgctccagttcgtgggcgatgcgagcctcggcgatagccagatagggagcctcgcgctcgatgccgacgaactcgaacccttcgcgtaccgctgccttgccggtgctaccgctgcccgtgaatgggtccagcaccttgccgcctggaggggtgaccaggcgcacgagataggccatcaggtccgtcggcttcaccgtggggtggttgttctggctggtcttgtcggtcccctcggactggaaacttccggggttctggcttccgctggaccagtgcagcggcttgcgctccatgtgctcacacccttcgttgcgatctttcctgctggccttggcgcagtagaagaagcgagcggcgctgcctccagcgtcgtgcggagagaaatgggcatcatgtgagccggcgaaggcgccgtagctgttgcgggtcttgtcgctgttgcgggttgccagcggcgccgcctggccggcgtcggccgggaaaagcgttaccacttcctcgctgccgtcgtggatcaggttcgcgggccagcggccagcaactgcaccgccgcgcggccctggcttcattgcgaagttggtgccgccggtttcagtgtagcgacgctcggcgctggcttcgccggaccgcgtgcgtggtacatgctcgtcgtgccggcagggaattccgccagaaccggcgcgcagagcctcgtcggttgggatgcgacaagcgtcgatgttcagtgccccggtaccgtgggccaggacgtttcgtgcaaccgtgcctatcagcggcttgcgggccatgcagatgggttcgtgccccggcttcagagcggtaccccagccttcgtactcgcccgacaggttgtgcgatttcgggaatccgctgccgaacacccacatgatctggtcgcggatctcgaagccggccatttcgatgccgaccgccatgtggtggtaggtgcgcggcgaggcgaaggacagcaggtgtccacctggcttcagcacgcgcaggcactcggccgcccattccagcgtgaaggcctggaaggcaagcatgccctttggggtgaggtcgtacttcccagctcccgcagagactgaacgatggccaccgttcggaccggcatcaggtgcgtggctcggcatttccgcccgtcgagctgcgcgcgcctcaatgtcggcgccgtcccaggccttgcccatgaagcggatgccgtagggcggatcagtcaccacgctgtcgaagctattgtcgggaaatgttttgagcacctgcaggcagtcgcccaggtgcaggcgataaggcaactccataaaggatcctcaggacgagtagagccgcgccggccggtggctagcgtcggtgatctggtggtgggttactgttcgtcgtcggctacggagagcccgacggcgagtagttgtcgcgacacgttttcgcttggcgtgtattcgtgtcgcgacacgacgagaagaggcaggagatcggcatcgggcagggctgaggcgttgagtagcagcgtcgagaacgcttctcgccagtcctcgaaatcgccgaccgcctgcaggcgctcgaacgcggcgtcgatcgccggcggggagggcagcttgcgctcggggatgcctgcctctcgttgtcgctggcgtttctcccgctggcgctgggcgttggtcttggccatcaggccaccttcttcgccttgagccccaggaagtcgggcaggccgtcgtatcgttcttcgtgatcagcgcggcgcggcatcaccccggcgaagaagttcttcaggtgctcatggtcagggaatgtgcagcggatcagagagttcggatttgcctgtcgcagtacgaggttcggtgcgctgccccggttgaatatcctcacgaccttctcgaacgttcccaggtacgcaggatctaccgcggtgatcggtgaccccatccactcgagcggaatcgatcgccgccagtccggatacttggcgcccaccagttcgagttgcgcgctgatcagagtgccaggatcgaacggcgcgaactgtttcacgtcatcgggagcgggccagtcggaatcggagatcacccctgcgcgttcgtagatgaacgccgtgccagcgttgcgtttcttcaggccagcgaccagcgccttgctcgggctgatgatgatcttattgctagcccaaccgtcagggtcgtgcatgactccgatgtggtggccgttcgttgcgatcagtagaacgcctccctgagacgccggctcgatgctgataccgttgaggtagtagcggacatcgttatgcgccatgaacagcgacacggcggcgaggtagtgggcctttgccctggcgagtagttccatgaggtatctccggtcagaagatgtaggagtgttggcggctgtcgcttgagcggcaggagaccgttcgaggcttcgcctcttgaactgctggcgcggcggcggacggcggcgtcctgggtggctgttgccgaaccgctgctgggagcgtgaacaccagcacgatgaagcccagggctgcaccgatgccgccggttcgaattgctcggcgcctggtcacttggcggcctgctggcgcttcatgcgctctgcgtatgcgcatgcctcgttgtggctccggcggaatccgcgcaccttgccggtggcagtttcgacgatgtggaagaaaccgcgcccctgaggcacgacctggtagggttccgccaccgcaggagccatgatccgctgagcgaacgccatgcgggcgagggcggtctgggagagcaggccggcgagaacttcggtttgttcctgatgcttgagcattgtggttctcctacgcgttgatagtgatttcttcgatccggcgaacggtgcgggcttcggcgagtcgtcgctcgttgctcggcctgcgattccggttcatatggtcgtcatcgattagcgggtggccggcgacgaggaatgcgagcacgaagacggccggcgagatgatcccgcgtcggaacgcctcaagcaccagtccgcgcacgctgcgcacacccatcttgaatttcgcgtcgtcgagacgtttctcgacggtccctggggcgatacccatgcgccgcgcgacttcctttgctgtcagttcgctggcgctccaggccgtggcttcgagttctcgcggcgcgagaccaaggccggtgtgaccgatccatccgccgcattggattgcttgcatgggaatagctccttggctgcatgggccagcactcggcattgcgtggagtgctcgcgcatgaagtcgagagaggggtgaagcggggcgcccaccgccccgcctctacttacaaaccgccttatggtttgaagcattttgggcgggacgcctggagcccgaactccggatgccccgcgggtacatcgttctcggcctgctggcgccgaggcgcccaggtcaggatcggcgctggcgctatcgagcgcgcgcagcggttcgggccgctggtcgtgaagcaccaggccgatgaggaatggaaggatgaacatggcttacccctggagggactctttcgcctgagcgacgagatccatcaaccgctctacccatgccgagcgagtggtgagggtgatcgattccgggccttcggccaggcctgcgcggagtgccgtagggaaggcatcgacgatatcggtagtgaccttcagcagatcatcgagaatggcgcgcggcacggtcggctcggctaccgctctgggggtgacctttgtccctcccgctgcgatcaccttcgcgagctgctggccgagcacctgcccggccttctcgccgtgcttcctgacgatccgcgcggcggtggtggccgctaccgcgccggagctgatcaactgctgcacatcggtattcgcgttgcctacgaccaacacctggtcgacgtgctgacgggtgcgccccatcttttgggcgatctgttcgacggtccacccgaacgcaatgagccgcttgtagccgtgtgcgagctccagaggggagagcttgcgcccctcctgggacgtgatcacgcggagcacgcgctcagcgtcgttaccggcgaacgcaacgatgggcacccagaactcgccgttcgggtcacgcggcagacggccctcggcgtcgagcttaaggtaagcgcgccggcggcggtgtccgtcgacaacccacatgcccccttcttcgcgcggtcgcacttcgagggcaggtacgattccgccctggtgcaggtagtcagcgagatccgcgatgctctgctcgaggtcttcgccctcggcgcgcaggttgaagccgggctcttcgtgaaggtcttcgaggcgagccttcatcgcatccgcgcgcttcaggtcgccgtccttgatcatctgcttgaacgatttggccgccatggggcctccgtctgttgtgattgcgtggttgctgtatgggggagtggtctggccggtgctgatctccggcagccgatgacttatcacagacacccacggcatcggccgctggcagtagggtttccccgtcatcccgctctcgtctgtctgcgcattcagaccactctccgatacagccctggaggagccgtgacgaacctccaggggatcgggcctgcgttggggagcccggcaggcgcgggtcatgccctgctaccggcagggcggcgggctactgatggaggacgccgcgcccgaacggcttgaagcagcatgcgcatacaggaacgccagtttcctgttccaactcgatgctgcgtgcggtgctccggtaagtgttcgcagcgaaggtcaggccggcgcgctcagcctcatccgctgcctgtagccatccagcaatcgctgggtgcgggactggcttaggcgccagttcgatttcgatctgcatcgtctgccctccagggcgtgttgacttcccgtctggccctcggtggagggccagccagtgaaatcggtgtttctcgcaaaccctcacgccggtagccggtggtgagcgcattgcgcatttcgtaccgtccaacggaactcaatagccggatcaactcggcgcccgttggctcgtcttcaggttgttaaggagcggtcggctcggtggcctgggccagcgctggattgctggttcgttggaatgaaatttagaaaactaaacagaggaggtcaaggatttattttagaaatctaaactttctgggcgaacgaacgcaaaaaagcccgcactgggcgggctttcgggacggttgtctgtggcctaggtgaagatgataggggcgccttctggtgcgaccatgatttgaagggcgttggactcgatggtctcgccatcagaggtgaaaaggatcttcatctcgccgggctggtctatggcaagaggggcaaagatcatttgtgcttgcacgttctttgacgacgtcgcggggttttttgaagcctcctcttgaagctgagcaagcggaacctccatctcagcaatggccttgttgttgaagagggcgctgattttgaacccgttgaagggcctgtcaggaggggttaaagcattaaccaccacgcaaagcttcattaggttagtcgggaagccctgcacgaacatagcgtctgcatacacgcctatgaggcttgttttcccgttaatttcaagacgtacatcatcacagtaggtggcatagacaaagcggctcattgatctgaattccttttgctggctgcttgagcttcgaaaagacggaacagtgcattgggatccaaatcgagagcagcgccaagcttgaccagcgtcgagtactgcgggtcaaccttgcctgactcgatctttgccacttgcggctggctggtttgtaatcgctcagccaattgcatctgggaaagtcctttgcgtagccggacggttctgagggtgtcgctctcgcctgggtaaaaggtgtccgctacccacgccctggcgtctgccaattctgcggcgctttctgggtctcgctctagctcgaccatcagcgcctcgaagtcgttgtgttgctgcgaaagattcgttacggagtaggtgcgcaccagaggatgcacattgctaccaagggccacgcttgctgctgcttgatctttagcaacgctcatcctcaaggcgcctgtaggcgctttggatgcgctgggagatagggtggctgagctcatagtcaaatctcgcgtctgtgctgtcaccgtgcatagccttctcgacaatggctaaaacgatgtaggtgcctggggcaaaaaaggcatagatgaacctaaagtcgagaatttccacctgaaacgagcgtagtcgccagaggttcattccgtgatcttgtgcagcccgccacattccggtgttgaaggttgcgcttcttggacgcggcgcattgggacggcccccgtagtcgctctgcgtcaggcgatccaacaggtcttgatcatcctgcaactgctggatcagcgcgacaagcttcagacccttccgcctgttgcttgccagaattccgcgtagatccgcagtcgcgtcatcgtgaacaatcagttcgtacactatatcgacctagatatattgctgcaagcccggccggtcagcatctgacctttagctccattgcgatcctaaggattgcaggtaagtcctacttgaaagccccgcgattgcggaccgtcgaccaccagaacacccagcctatgatgcggatgtggtcgtctcggacatgctctggtccgtaatcctcgtctgcatgctcttctcggttgaagcttcgcaggcgaagacctccaccgggaagtcggtagaggtatttcactcgcagcatgccttcgtgctccagggcatatacctctccatccacgaccttggttgtagccctgtcgatgcctatggtcgctccgctcatgatgaggggttccatgctgttgcccgtgatgcgagcacacaccgcagcagtcggatcaacgcccgccgctctaagggttgcgtaagagaacctaagcttgcgtccaggcatctcctgaacagtcgttcgacctgatccggcagccaattcaacttccttgtagagcggcagttcgacttcgtcatcatcaagaggggtggagtcgtcccagggtgacaggtcgccaattattacggcctctgcctggctgctgttgggctttgcctctgtcccggagatcagccattcgggcgagcactgcaactcccgagcgacagccatcaggttttcgcccttgatgaggttcgtgccgttcatccagaaggtgacggttcctttcgacacacccacgcggctcgccagttctgactggcttagtcgcagggcctttagcctcgctctgattctgtctttgagttccatgtttagcattctaaacatctggcggtttagataacttgcgcgccttggtttatttttctaaactcgcgaaaaaccaaggagccagccaaatgacctacgaagaggcgctcacccatttcaaaacggggcgcgccattgctttggccctgggggtgagtcctgggcggatttcccagtgcaagtcggagggtggattttcgtaccggcaccaatgcgtgctggaaaaagcgtccgcgggggtccttcaggcacgtgaagaggacgagcctcataaggccgcatcctgagcatccagtctatttgccggggccagcgccaactaggcggtcaacacccctgttcaggcatccagtagagcagacagcaaaaagcccggcggcaaccgggctttctgaggaggcaccgtagggcggtgccgaacatccaacggagacgaatatgtcacaagttgcagtcatccaacaaggcccggtcctgacgatgagcagtcgtgagattgcggatttgaccggcaaaaagcacaagaacgtcttgagggacattcgggagatgctggaggcgttgaggaaggatggctcagatttgagccatgtcagggaagacctcgactcccgcgggtacaccgagaatttccacctcgaccgagacctgaccgagaccctcatctctggatacagcgttcccctccggtaccgggtgattcggcgactccacgaactggagtccagccaggttccgagcatcccaacaaccttgccagaggcactcaggctcgccgccgatcaggccgagcagaaccatgcgttgcggctagtcatcagcgagcaggcgcctaaggtccaggccctggagcgactcagcggcgcagcaggaacgatgtgcatcaccgacgctgcgaagcacctgaagatcaacccctcccggctcttcgactggctccagcagaaccgatggatctaccgccggagcggctcagctcgctggatcggctatcagccgcgaatccaagacggctgggtcatgcacaaggttacggttctcggccgggacgaccagggcgacgagcgtgcggcgagccaggtacgcatcactgccaaggggctgtcggtgctggcgcggaagatcgaggagggcaagctgtgatcctcggtagcgtgtcgcgacacgaaatcacgaatcaagaaaatgtgtcgccggaggtgcgccagtgagcacgatcatcatgtcggcctgctggcctctccagggaatgagccccgcgcagaaggcggtactgatctcgctggcagaccaggcgaacgaccaaggggtgtgctggccggcggtggacagcatagcgacgcgttgctgcctgtcgaagcgcgctgtgcagcaggccatcaagtggctgcgttccgtagggattgtgagcgtcgaggagcgacagggcaggtcgaccatgtactcggtgacccccgcagcatatgcacccccgcaggaaatgcaccccagcagcaaatgcacccgtgcaggaaatgcacccacccccgcagatgctgcacccccacccccgcaggaaatgcaccccacccccgcagcatctgcacccagaaccgtaatagaacctacaagggaaccatcagggaaccttttgccggccgattccggccagcccgatgcggagcgtgatcggcaacaggcatgccgagcgatctggtcggcgtatgcggcagcgtaccagcaccggtacggaacccatccggtgcgaaactcgaaggtcaatggtcaggttcgcgacctgctgaagcgcttgggcgctgaggaggctccggcggtggccgcgtacttcgtcggaatcaacgacgcctacctgatccgcaactgtcacgacctgggctccctgctggccagggcagagtcgtatcgcacccagtgggcgactgaccggcagatgaacggggccacggctcggcaactggagcgcactcaggcgaacctgaacgccgccaaggaggctgcggagagcatccgagaggaggggcgcgccaatgctttcctgtgacgaacaggccgacctggccgccgcgctggtggcgactgctgaaacgcttggccaggagatgagtgccaatgccgcgaagctgatggccaaggatctcgcagagtatccgggggaggcgatccgcagcgctctgcaggcgtgccgccgtgaattgaccggaaaactcaccctcgcagccatcctgcagcgtgtgcaggcagtcgatggccggcctgaaccgaatgaggcctgggcgctggcgctggaagcatcggacgagcgcgcaacggtggtcctcaccccggagattcaggaagcgctcaccattgctgcgccgatcctggaggcgagagacaaggtgggtgcccgcatggcgttcatatcggcctatgagcgcgcagtgtctcgctcccggcgcgaggcgcttcctgtcgagtggcgtgtgtcccttggtcacgacgaggcaggccgtcaggcgggtatccagaaagccgccgcgctaaaccgcttgccagccgccgaggtggcgcgcctggagggggtggtggttcttcaactgccggccccgacagatgccggccaagcgatcgccgggctgctcactggcaatgcccctgccgaggtcacgaaggcaccgaaggggttcgcggaaaacatggcgaagctcaaggaaagtcttgccgcacaccgcgctcagcgcgagcagaaagagaaggacgaagccgccaggcggcgcgccgatctcaacgaacgaatcaaccggcacaacgaggccatacaacagctacaggagtcccgttcatgaagtggaaggcgctcaacgattatctagcggttagcgacagctccccgccctacaaggtttgcaagctcttggtcgccggcaaggctcactaccgggcgagcgttcaaggcgaattcatttgcgcccccgctgcgtcgtcgaaagaggctcaggctatttgcgagcgtcaccagcagatcatgtatccgcggggtgtcgcgtgaaggggcgggccgttacttcggagcagaaacggtggcacgacctgctggcgcgccaggtgggatgcatcgcatgtcgagtctccatggggatcgtgaacacctattgcagcatccaccacgtggacggaagaacgaaaccccatgcgcattggtatgtgcttccgctgtgcgctggccatcatcagaacggatacggcggcgagggattcaccgggatcgctgtccacccctacaaggcgcgctttgaggcagagtacggagcccagtcggacctgctttcgaaatgcgcttcgatcctggcggaggaggggcacgacataccggcggggttcctcgcatggctggacggtagcgaggtagaggcatgatctcgattcgccttccttggccgcccagcaataacacctactaccgcaacacatcttccggaacgctgatcagcgagcgtggcaggagctatcgcagatcggtattgcagcactgccttgcgcaaggcatcaggaggacgaccggatctgttcgggttgttatccatgcatgcccaccagatcggcgaaagcgcgacctcgacaatctcctcaaggggctccttgactcgctaaccaaggctggcgcctgggatgacgacggcttggtagatgacctgcggattgttcgcggggaggtgaaagttgggggcgaggtgctggcatgaaaaagacacatggtccagatctgacgaccaagccgcgcgtgctcgctcagtgctccgtttgcaacggaaaagggtacagccgtggcgtattccacgagatcgattgcgacgcgtgcggtgccgctggcttcgttgacggggtgacggggctggcgctcgatcagcgggatgcggtggtgcaactgcggatgtgggtaaagcggctgctggaggagcagcgccgccaggcgagcatgctggcgcgagaagagaacaaccggaagggagctggcggcgctcactttcgaggggattgaccagccattggcgctgcgcgcgctggaggagaggacgatgatttacgaaagcgtttcaagtgcagtcgtttcggcgctggcagcggactgcatcgacaacacaagcaagcaggcttggcaaaagctctatcaggccggcgagtctggtcgtcgtggtggggtaatggtatccgctgatctcaggcagcaaatcgattgctgggtgcatgctcgcttgcatgatcagctcattccgcgtcactgggccgctctggtggcgaagtacagcacccatcaggcaaagaaagtccaggcgatctcgcttttgcggtcggtggtcgcaacgccggcgcctgctctcttcctctacaaagctataacgacctgggcgattccgaagctgaagggggttcagccggcgttgcggaaaaccgtgtctgtcgaaatcccggtggatggatcaccagaaaagcaggcgcgggccgtacgcgccgcattggaggcggagcgggtcaagcggaagcgtcttatggctcgatcgtctggaatgatcgtcctgccggatgagttctacgacatgaacacctgggatctcgatggaaagccagaatcgactcggcgtgaatggcgcaggaagatccatcgtgttctcgacgaaatggtcgaagaggcgctggtggcggcggagcagattcttaacgcggagggcttgctggccaaggatgcggcatagggcttgacttgccgtcatcactccatcagtatttgtctcatcctgccgatcttgcgcgttttgtggatcgagcaacaaagagcccagccttcgagctgggctttttcgtttctgcaggtggcgcattgcgctgcggggcgcacgacccccttgaaaggccgtacctgcatccattcccggcccagccttcgtgctgggcttttttatttccgccccgccgaggggatcacgagatgtcaaacatgcccgacaaaccggagacctgggcgttggtgctcgcctggttgagccaacatgctcccgtgctgtacgccactggtctctcgttcgtgatggctgcaatccgaatcatctatgggggcggcacccgtcgccaggcgatcctcgaaggcgctatttgcggatgcctcacggtgactttgatcagtggcttggagttttttggcttgcctcagtcgctttccaccttcgttggtgggtgggttgggttcctgggcgttgagaagatccgggcgctggccgaccgttacgcagacttcaagctgcctagcagcaaggcgggtgagtgatggcctgcaagcgctgtgaggaaacccgtgcctacatcctggccaatctgaggatcatgtatgagcgagcgaccctgcgaaagagaaaagccagtgttggtggtgaagatggatcggctactggacaaagagcagctagcggcgttcgcaaaggacgttgaacggggagccgagcgtcttggtatgagtgttctgctgctgactggcggggcggatgcgcacattgatcgggacctgcaccctctgctggttgacatggttgccgagcagcgcaagaccaacgacctgctcaccgcgctgatcactgcgatggcagatgaaggcgctgtcgatgtcgacgccgagagcatcatcacgcatgacctgtcaggcaggccgctgaagaagccgggcggtcaccatggctaagatcccgacactggcgcctcggctgcagcaggtcggctccaagctgaaggcaacggccagcaccagcgagcgacgaatgaccggaagcaggctgcagaagcgccgctaccggctgtggctggcttcacctcagtgcgccgaatgcggcgtgatggtggcataccctggcggcttcgaactggaccacaaggtcccgctcttccagggcggcgaggacacggaagagaactgtcagatcctctgctgcggtcccggaagctgccacgaccgcaagacgcggaccgatgggggtgcagcatgagtccgacgtctccctgacttctgcaccaaattggtgcaaaaaatcgccccagaggggaggggtgggtcaaaactctgaaaagtcatcgcactggaaaccgcgccccctctcattcgcggatttttcccccctttgaggtttttgttaatggcgttaacagacaaacagcggcggtttgttgacgcaaaggccagaggtgcgtccaacaaggaggcagccgaggccgcgggctacgcgccttccagtgctgccgtcgccggatctcgcctggccaaacatcccgatgttgttgccgaactgcagaagttaacggcgccacgaaatgttaatccgcgccctccgcctaacgcacatccagacgttgctggcgatcttcccgattcaaatggcgagttcctcgattgccttccggttaccggcgacccattggtgtggttgctcgcgctgatgaacgagcctcgtgcaaaggtgttcgatcgccggagcgctgcccagaaggctgtcgactacttccacgggaagaaggctgaccaggggaagaaggagcagcggggtaccgcggctaaagaagcgagcaagggcaaattcgcagcgcgtccagcgccgaaacttgctgtcgacaacaccaaggggtgacgcatgcagtggactacggcctgtcctgattggcagcgccggatcgtcgctggccagtcgcttatcccgttcgcaccacttttcccaagcgaggccgaggccgcgctgcaggtcttccgctcgctgcgggtagttgaccttcctggccagccgaccttcggcgagtgctgcgatcagtgggtcttcgatttcgtcgctgcgatcttcggcgcctacgacgccgagaacggcaagcaactgatccgaaccttctttctgctcatcagcaagaagaacacgaagtccaccatcgccgcaggcatcatgctgacggcgctgatcctcaattggcgacatgatgaggagctcctgattatcgctccgaccattgaggtcgcggcgaacagctataagccggctgctgcgatggtgcgtgcagatcctgagttggctgaactgctccacgttcaggatcacatcaggactatcacccacctggttaccaacgcggccctgaaggtcgtggcggccgataccgacaccgtgtcgggtaagaagtccggcaagatcctgatcgacgagctttgggtgttcggcaagcgccctaacgcagacgcgatgctgatggaagccaccggcggccagatctctcgggaagaggggttcgtcatcatgctctccacgcagagcgacgagccgcccgccggcgtcttcaaggagcagttggattacttccgtgatgtccgggacggcgtggtcgatgaccgcaagtcgctgggcgtactgtacgagttccccgaggacatggtcgagaacaagacctacctcaacccggacaacttctacgtcaccaatcccaacctgggccgatcggtcagcagggagtggttggaggatcacctggccaaggtgctccggatggacgagggggcgcagcgcaagttcttcgccaagcacctcaacatccagataggcatgaacctgcgggcaaaccgctgggccggcgccgatcactgggagaagaggacggacaagtcgctgacgttggatcagctgattctccgctccgaggtgatcgtggccggaatcgacggcggcggcctcgatgacttgctcggcctgacgcttctcggtcgcgagaaggattcccgtcgctggttgcattgggcgcatgcctgggcgcacgagatcgtgctggagcggcgcaaggacatcgctaccaagctcctggacttcaaggccgatggcgacctgaccatcgttgccctccccggagacgatgtgaacgaacttgccgacatcctctgtcgagtgaagacagccgggctgttccccgagaagcaggcgatcggtgtcgaccaggccggtatcggcgacatcgtcgacgagctcaccaccgaggagcgaggtttcacgatggagcacatcgtgggcatcggccaaggctggaagctcaatggggcgatcaagaccaccgagcggaaggtcgccggcggcgagctcgtccacggcggccagccgctgatggcctggtgcgtcggcaacgcgcggaccgtccaggtcggcaacgccctcgccatcaacaagcaggtcagcggcaccgccaagatcgacccgctgatggccaccttcgatgcagcaacgctcatggcgctcaacccctcggcttgtgatgagggagatttcaatgaattcctgaaggcaccgatcatcgtatgaagcccaagacgaagaagccgagccggctaaaggctgccgttctgggctggctgggtgtaccggtcggcctgacggatgagacgttctggaatcagttcggcacgaatgtcgctggccaatcggtcaacgagtgttcggtcctcaagctgtctgctgtgtgggcctgcgcgcgcttgatcgccgagacaatctccactctgcccttgggcctctatgagaagaccgccagaggccggctggcgctgaccgatcacccgctctacagcatcattcattcccgtcccaacccggactccaccgcggtggtgttctgggaggcgatgatcgtctccatgttgttgcgggggaacggattcgcggagaagaactacatcggcaagcgcatggtgtcgatggacttcctggcgcctggccgcctttccatcacccgcgacatcaacgggaacaggaagtaccggtacaccgagaagaatgggacgcagcgcgatatccccgcgaagaacatcttccgtatcccgggcttcaccatcgacggtgattgggggctgtccgctatcgagtacgggtcgcaagttttcggatcagccctggcggccggaaacgctgccaacagcacattcgagaaaggcctggcgccgacagttgcgttcaccatgcagcgggtcctgaacaaggagcagcgaaccgagtttcgcgagagcctggccgaggtcagcggcgccatcaatgccgggaagtcgcctctgctcgagggcggcatggatgccaagaccattggaatcaaccccaaggatgcccagcttctggagtctcgcgcgttcagcgtggaagaaatctgccgctggttcagggtgccgcccttcatggtcggccagtcggagaagtccagctcctgggggaccgggatcgagcaacagatgatcggtttcctgacattcaccctgcggccttggctgactcgcatcgagcaggccatcaacaaggacctgctctcgctggccgaccagatgactacctacgcggagttttccgtggaaggcctgctgcgagctgacagcaaaggccgcgcggaatacctggcgagcatggtgaacagcggcctgatgacccgcgatgaaggtcgcgccaaggagaacctgccgctaatgggtggcaatgccgacgtgctcacagtgcagaccgcactgatccccctcgaccagctgggcaaggcccccgccggcaactgatccagaggaaccaccatgtccagaaaaacactgcccgccgcgcgtgtgggcgcgcccgcggctggcctgcgttttgacctatcggcccgcgccatggagcgctggaacccagcagtgcaggcagcctccgagaaagacaacagcatcagcatcttcgacatcatcggtcaggactactggaccggcgatggtgttaccgccaagcgcattgccggcgcactccgtacgatcggcgacggtgacgtggtggtgaatatcaacagcccaggcggcgacatgttcgaggggctggctatctacaacctgctccgcgagcacccggggaacgtgaccatcaaggtgctcggcatggccgcatcggccgcctccatcatcgcgatggcaggtgacgatgtgcaggtggctcgtgcgggcttcctgatgattcacaacgcctggaccttggccgccggcaaccggcacgacttccgggaatttgcggattacctggagcccttcgacgcagcgatggctgacgtctatgtggctcgcaccggcctggatgcaaagaccgtcgccacgatgatggacggcgagacctggatcgggggaagcaaggcggtagagcagggctttgccgattctttgctcgactccgacgaggtcgccggcggcaacgagaaaccatcagcccagacggtgcgccgcatcgagaacgcgctgcgcgcgtctggcatgcctcgctccgaggccatgcgcctgatctccgatttcaaagccagcctgagcgactcggccggcgatggtgagcgtgacgccaccaaccttggcgacggctctgcctccgccatcagctccaccatctccctcgaaaatttcatcaagaggtaaggccaaatgagccagcttgagcaagagtacaaacaggtccaggcggacctgaagaaagtcggcgatgacctgcgcacctacgccgagcagtctgaaaaagaactgaaggtccattccaagctctccgaagaaaccaaggccagcgtcgacaagctgctggtttcccagggcgaactccaggcacgcctgcaggctgccgagcagctcatggccaagctggagaaaggaggcggccgcatcatcaccccggaaagcatgggcgaaaccttcgtcgcagctgaaggctacgacgcctgggctgcccgcgccgcgggcggtgcgaagggcagctttaccgttccggtgaaggctgcgatcaccagcctgaccggctctgctggcgacctgatccagccgcagcgcgtcggaatggtcctccccactcagcagcgcctcttcgtacgcgacctgctggcttgggggcgcactacctcgaactccatcgagtatgtgcgcgagaccggcttcaccaacaacgccgcgccggtgtcggagaacccgcagaacccgaagccggaatcggacatcaccttcgagctggataccgatccggtggccacgatcgcccactgggttcgtgcgtcccgccaggttctgtcggacgctccaatgctggccagctacatcgacggccgcctgcgctatggcctgaagctcaaggaggagatgcagctgctcaagggctccggcgtcggcctcaacctgaacggcctctacactcaggcgagcatctacgcgaaccctggcgtcgtcgttcaggctgagaccgccatcgaccgcctacgcctcgcgctactgcaggtcaccctggccgagtacgacgccgacggcatcgtgctgagcccagtggactgggccgcgatcgagctgaccaaggacaagaacaacaactatgtcttcgccaccccgaccggcctggccgttccgggtctgtggggtcgcccggttgttgcttccaagtccatggatatcggtgatttcctgactggctccttccagcaaggcgccgaaggttgggatcgcgaggacgtcagcgtcaccgtctccaccgaggaccgcgacaacctcgtgaagaacatggtcaccatcctctgcgaggagcgcgtgggcctgtcggtgttccgtccggaagccttcgtgaagggcgacttcgacggcctgccggcgtcctgatctactggcggggcttcggccccgccatctcctgaggaaagaccatggtcctggtaacagcacttacgggtttcgaccacggtggccgtcgccggcgcgatgagcaattcgacgtcagcccgcagcatgccgccgcgctgaagcgcaacgggctcgtcacctacgacgagaaccaggcggaccccgatccagccgctggcgagaagtcgtctgcatcgcaagtggccccagtctcaccgcagacgactgcgaaacagtccgggcgtggcgtgaagaagaagccggccgcggagtaatcgtcaccaacaccacattccggctctgtccatgggctgacgttctgtacgcgatggatgcggcatggtggagggttcacggcgaagaggctgccaatgctttcggcggcgagctctgcgcgccactgaccttccctggcgtgaagaggattcgcttccatcatttccagaatagcggggccggggctgcgtcgctcgcctccttctggggtgctcggcgcatcattctgctgggctacgactgccagaaaaccggcggccgcgctcactggcacggtgaccacccggccgtcctgggaaatgccggcagcgtcgacaagtggcccgcgcagttccgccaactggcggaccatctcgctggccttgatgtcattaactgcagtcgagagacggccctggaggccttcccgcggcgcccccttgaagaggttctctcgtgagcgtcatcaaccttcaggacgtgaagcaggccctgcgcgttatccacagcgccgacgatgccctgatccagcaactgatcgacagcgccgaagatgaggctgtgcgcttctgcggccgcacgcagttgccgaccttaccgctggacaacccctgctcaccgagtagcgaggatgtcccgtccagcgaggacccggtggcgcccagcgtgttcaccgctgtggtggcgctggtgaaggccgactacgaggcgacggtcgacgaggcgaagaagttgcgcgaattggccgaggtcaagctgatgccgtaccgcatcggcctgggggtgtgaggtgctgaccaatcgattgcggcaccggatcaccttccaggcgcaggagcagcagcaggactcggagtcgggtgacgtgctgctggtctgggtggacgcctcgctgtcggacggcacgctgctggtggacgtcccggccgaagtgctcactggcgccggccgagagttcatggcggcgaacaccaagcagaacgagacagacgccagggtcaacctgcgttggttccctgatctggatatgacctggcgcctcctctggcagggccagcccttcaccattaccggcgccgacacggatgccacggggcgcaaggaatggcgtctgcgctgcgcgacaggagtcaccgacggtcgatgatgatcatcaacggcatgaaggggctgggggacaacatctaccagcgggcattcatcaagcagcttccgcgcggcgtgtggctgcagactccctggcccgagctctacaaggacatcccagacatcaacctgatcctgccggtaaccaggctgcgcacgcagatgaagaacatctgccggcaaccgaagggcacctggcaacggcgtccgcgcggaactgtcgttcaggttggctacggccgagagggcatcttccccgggatgatgcgcagcttcgctcgaacacccggagagatggacctgcccgatttcggaccatcgccggtcgatggccgctacgtggtgatcaggccggcgacggttcgctccgaatggcgggccgacacccgaaacccgctgcccgagtacatcgcccaggcggccatcgagatgcgtcgtcgcggctacaaggtggtctcggtagccgacctggtcgaaggccgtgagtgggcgcttgatcccctgccggtcgctgacctgcagttccaccgcggtgagctaccagtcgaccagcttctggccttggtgcagggcgccgcggcggtgatcggtggaatcgggtggctcctaccggcagcgatcgccgccaaggtgcaggcgctgatcatctgcggcggccaaggcggctacaacgcgccggagctcatcacctccaaggcgatggacgtctctcgaatcgaatttgtggtgcccgacaatttctgtcgctgcacccaaaaagaacacaactgcgacaagaggatctcgaactatgcagagcgccttaccgcctgggctagccgactgcctgctgtggtcggctgagctgggcatggggtaccacccacgcaagccgatggactactccggtccctacttcgagaagtaccaggcgatggacgccaccccgatggggggagctttgaccaaggcccgcgtgcgcatggttcgacgtcaccacggtggcgacctgatcgacattggcattggcggcggtcgcttcctcgaagagtctggcgccttcggctttgacgtaaatgccgacgctgtgcgctggctcaaggagcgcggccgcttcctggacccctacgctggaaagatcccggcgatcacctgttgggacagtctcgagcatatcccgaaccctgaagggctgctggctcaggtggtggactgggtgttcgtctcgatgccgatttaccaggatcaggccgactgcctggcaagcaagcacttcaagcccggtgagcatctctggtactggactcagaacggtctcatcagctggtttgcgcggctcggcttcggctgtgtcgagatcaaccaggaagagtccgacatcggccgcgaggggatcaccagcttcgctttccggaggttccatggctgacggcgtcgagttcagcatcaccggcttggagtccctgctgggcaagctggatgctctgagcgtcgacattcgccgaaagggtggccgcgccgctttgcgaaaagcggccatggtggcgctcaatgccgcgaaggctggcgccgagaagatcgatgacccgggtaccggccgaagcatttccgacaacatcgtcctgcggtggaacggtcgtctcttcaagcagtccggcgaccttggcttccgtattggcgtgctccatggggctgttttgccggcgaggggcgaccgcgtcgacaagcagaagaatgcgccgactccgcactggcgtctctgggaatttggaacctcgaagatgaaggcatcacctttcatgcgcagtgcgctggccgacaacatcgccgaggtcacgagcactttcgtcagcgagtacgagaaagccatcgaccgcgcaatcaagcgcgcccagaagatggccgctgggagaaactgatgtacgcaccgattttcaaagtctgctcgcaggaccctggcgttgtcgccttgcttggtgcgaagccgacccgactctatctgttcgctgaagcaccagaccagcctggtcgcccctatgccacatggcagacctttggtggcgagcctgagaactacctggcccaccgccctgacatcgactctttcagcctgcaggtggacgtcttcgcggacacggccgcccaggtccgcgccgtcgcgacggcgatccgtaacgcgatcgaactgcgcgccacgatcactcgctggagcggggaagagcgggacgatccaacagacctataccgtatcagcttcgacgttgactggtgggttaaccgctagtcaccgacctaagtaacgacccgcatctgcgggtttttttgtgcctcaagaaacccgcgacaggagacacccatgtccatcttggctcaaggaactcagttcttcgtaatcgatccgaatctcgacagcaatggccccggtgtgctggagatcgattgcatcaccgctttcaatcctggcggaaacccgtccgaccagatcgaagacacctgcctgaaatacaactcgcgaacctacaagaagggcctgcgcactcccgggcaggcaaccgggacgctgaatgctgacccggaaaatgacagtcactaccgcttttggcagttcgcggaggaccccgaattcgatcagatcgaaatggatatggtcatcggctggtcagacggtccgcttgaccagagtggggagccgatctctatcccgacggttgcgagtgatggcggcttcaatctgcccgccaatcgcacctggtaccgtttccggggctacgtgtctgacttcccgttcgatttccagagcaacgctgtggttgctacgaacttcactattcagcggtctggccgcggttactggatcagaaaggcggtttaaacatgcagctgagtatttcaaatcttgcaacgatcggtgctttcacgggtgcgccagtggaaagggaaatcacatggaagcaaggcgataaggaagtcaccgctaccgtctacgtcaagcctctgtcgtacagcaccgccgtctccgacctccttgcgatgaatggcaaggtcgatggcgtagctggacgtatcgctgcgtcaatcgtggacgaagagggcaagccggtattcacgccggcagatatcaccggcgaggccgaccccagtcgcggcgcgctcgatggaaacctgaccatcgccctgctcaccgttatcgccgaggtgaacaacctgggaaagacgaccagctcagcgaactagatgaggtctggcatgagctggtgatgtgtgggattggcggaagaaccattgcagaagccaaatctcgcctcagctaccgggagttcatgagctggtgcaagttcagggacaagcgcggcagtcttcatcttggtatgagaatagagcgtggcacggccttattgtctgcgctctacgccaatactcatagcaaggagccttacaagatatacgacttcatgcctcacgaggatgagcccgtcctgagcttagaagctgccctcgattcctgggggtagcagtctgatcccgcccgcaactaaacgggcatttttttggagtccatgatggccacgcgaagtctagggacgctcacgctagatattatcgccaaggttggcgggttcgtgtccggcatggacgctgctgagcgccgctcggaaaagtggcgcaaggaagtcgagaagaatgcggcaaaggtcggtgccgcaattggcgccgccactgcggcaggtattaccgcgcttgctgccctcactgtttcgacagttcgcaatgccaatgaaatcgcaaaccttgctagcgttgccaatgcgagcacgaccgagtttcagaaatatgcggccggcgcaaagatggttggcattgagcaagagaagcttgctgacatcttcaaggatgtgaacgacaaggtaggcgacttcctcaataccggcggtggcgcgcttgctgactttttcgagaacgtagcgccgaaaattggcgtgaccgcagaccagttccggaatctgagcggcccccaggcccttggcttgtatgtctcaagcctggaaaaggccaaggtcagccagtcggacatgaccttctatctggaggctatcgcgagcgatgcgactgcgctgctcccgttgcttcgcaataacgctgaaggattcaagacctttggtgacgccgcccaggccgctggcgcgattctcgacgagaagacgattaagtcggcgaatgagcttcaggccgcaacctggctggttgagcagagcgcatcgggcctaaaaaaccaactaagcacagcgctgataccaattctgagcgatctcgctgactctatattcgacgtgaccaaggaaggcacggcgatggtgagtgttggcgaattcgttgccgattcgttccgttggatagcgaagacagcaattggcgctgtcgcagcgttcgagctggtggggaaatcgattgctggcgccgcagcaacggccagggctggttttgatggagtgacgtggctggaactcgcgtccggccccgccgggcttgctaaacgccttgcgcaaaactgggacggaatcaaggccagcgccggtgtggcagcagaagacctgtccaatacggtctccaagtatgccggcatcatggacagtatcgaccgcgccggaacgggtggaaccaatgggcaggtagccaagctggccgaaacgctagcgtcgcttcgtgagcaggcgaataagcctggagctttcaaggctcttaccaaggagcagaaggaagctgggaaagaagccgaggctgctgctaagaagctgcaaagcgcctacgaaacggttgagcagtcgtatcagcgacagatagcgctgatcaacacggaagtcgacaagcgcaaggatgccaccgaggtagcaaagcttcagttcgaaatcgagtcgggcaagctggttggaatcaatgccgagcagcagaaacgcttgcatggcttggtggaagagcttgaccgcctgaagcagctaaagcaggcgaacgaggatgcggcgaaagctcaggctttccgtgcaacgctcaatgaatcgaacgcaactgctcgggcaggttttgcgattgaactggccggatcgggcagcggcgacaagctgagagagagactgcgcgcagacctggagatccagcaggactacaacaaacagcttgccgatctccagaagcagttcaacagcgcagaaatcagcaaggaactctacgaccaagaaactgacctcctgcgccaggctctggccgagcgcctggaaatccagcatgagtactacgcagctcaggatgaggctcagagcaactggttggatggcgtcacgtctgcctgggagaactatcgcgacacagccacggactatcaacagcaagctgccgacttcaccacgcagacactggacgggctcacatctgctgtaggagacggcatcgcttcgatgatcatggacggcgagagtcttgccgatgttttcaagaacatcgcgcagacgatggccacaagcatcatcaatgccctcgcgcagatggccgcccaatggctggtctatcaggcggtgcaactggtgagcgggaaagctgctcaggctagcgccgcctctactctcatcgcgaacgcacaagcaactgccttccaggctcaactggcggcatttgcgagcaccgctgcaatcccaatcgtaggcccgctgttggctccggcggcggctgcttcggctgccggcatcaccgccccaatggttgccggagttgctgcgtccgcccttgctggcatggctcacgatggcattgatgctgttccggagaccggcacctggttactccagaagggcgagagggtgacgacggcagagacgagcgcaaagctcgacaggacgcttgatgacgttcgcgcaaatcagagcagcggcggagcgccgaccataaacctgattgaggatcgcagccgcgcggggcaggtcaatactcgccgccaggacgaccaatacatcatcgacgttgtagtagccgatctattcggtgatggtcgttcatcgaaagctatcggaagctcgttcggcattcgtaggagcggcacatgaagcagtaccccaatatctgcccgcctcagcgggatggctatgggctgactcctgtcagccccctcatccgtacggagatgcagacgggtagggcgaggcagcggcgtcacttcaccgcaactccaactatggcaagcgtgaggtggaggctcaacgatagcgaggcaatgctatttgaggcctggttccgcgacgttctagtggatggttaccactggttcgaatgcccgctaaagacgccggagactcctgatggtttgcgtgcgtatgccgccagattcaccgacatctatgacggtccaaagctggtcagcggcagtatctcgctctgggatttcaccgccacactggagttgcgtgagcgccccgtcatcgatgctgggtgggccgagattctgcccgagtacatcctcctcgcggatatcttcgatatcgcaatgaacagggagtggcctcgacatggcgacggctcttgagcggttctatgcatcggatgggccggatcttccgattgcaacgatcgagattactcggccctccaggcccgatccgatcctcatctgtcaggggttcaaagacctgacctgcatgacagaagacggacggctactgacattcatcgctggcgctattgacgtttcgatcccgaagcgcgacaacagcgggaaccagaacgttggctttgcgatcgacaacgtgactggctttgctcagcaatatattgccgaggccatcgacgccggagatccggtcacgcttgtcctgcgaatctacctcgaaagcgacctgactgcgccggcagagcgcccctatcggatgcgcgtgaaaggggccgacttcgaaagcctcactgtccaggtggaggccggctactacgacctcatcaacaccgcagctctgcgccacatctacaacgtcagcgagttccctggactcaaatactggccctgatcccatgccgaacagatacctcaccgccatctataccgagggcggtcgggccctgccgtgcctggactgctggggcctgacgctcatagcgcgggttgagctgttcgggctgccgatgctgaccgacttcggcggtgtcacgcggcacaccccggtttcgatgcaaagggcttgcgatacggagatccagcgcgcgctcgagcaatgcgagccaggacctggggtcatcgccgcggcctacagagggcggctgctcgatcacgtaggtctgctggtcgaagtggatggacgcctccgggttctcgaaatcaacccgggaagcggggtttcactcaccccgctccagaagttctccgacaaatactccaaggtggtcttctaccgtgatcgaaatctacccatcgctccttgacggagaaccgctggagcggcatccgatcggccgcaggatgacgattcattcctggctgaccgcgaattcgcctgggtaccgctgccacgacgtccacccgttctctatcggtgttgtccccgctgaggttgcgctctgcgatgacctcaccgacaagcagaaaaaagcccatgaggagttcatccatcccggtgagtgggccgagcgcatcatcgaccgcggcgacattgttcgtatctacaagctgcctcgcgggactgatccgttcacgatcaccgcggcactgttcaaaggcgtccagtccgcattccggatgctcatgccacagttgccaggcatgcccacaaacccggggcagggcgagtccctggctgactccagcgcgcgaggaaacaaggtcaagctcggcgacgcaattcgcgaagtcgccggccgccggctgatcttccccgactacatcctgcctcccaggaagtattttgccggcccacgcgagcagtggaccgaaatgctgttgtgcatcggccgtggtcggttccagatacaggagggcggggtcaaaatcggcgataccacgttcctcgcgctcggcgcggaagcctctttccagattttcgagccaggccagagtcttggttcccacccatccgccatctggtggcactccgcgccggaggttggcgctagttcgacaggtaatgctggcctggaactcaccgagtcctcgacgctcaccccgaacccaaccgcaacgaccttcacgttctcggggagcaacatcattatcccctctggcgccggctcgttcccgtctgactgggtcgccgggacgatcctgcgagtagaggcgcagtatccgtacaccgtcgtcgacggcggtggaagcgcgcgcgacaccatctcgggcgatatcgcgcaacttggtctgtctgttggaaccgagattcaggtcgtcggcgttaactcggggctctacgtcgtaaacaccgtgaactccaccaacttgacgctgaactacgatagcggcgcccccgtaaatgctctacaggtgggggccggcgacgctgcaatcggtttgcgtgggctcaggttccgaatcactgcgtacagcgcccagcagatcaccgtagagcgcctgacgtctgctggggctaccgatccagcctggccaggattctccccgctgaactccagtacgtcgcgcattaccgttgatacctcgaactccgagggaggctggcgcggcccattcccggcgtgcccggcgggcgagaaaacgagcgttgtcgagtgggacatcttttgcccaaacgggttgatattcatcgaccggaagggcaaccagattccgctgagtggctactacactgtccagtaccgcgacatggatatcggtggcgcatggacctcgatcgactaccagcacaacggagccacgctcgaccaaatcgggttcacaacgcgcctgaatctcccgtatgccatgcgaccagagatccgcatgcggcagcgataccccatcgggaaaaacgaattggagttccgcgacacactgcaatggtacggcctgcgttcgcagctccaggcgccgacctcatacgcgggcgtgacggtgctcgcggttcggtaccggtcttctgatcgcatttccgcgcagaccgagagccgcatctcggtagaggctacccgcatgcttccaacccgccagggcggagcatggacgactgaactcgcaacgcgagacatcgtcccgttcctttgctacatcgcgaaagagcgtgggtacaccgatgccgatctcgacctcgatgaactcgaccggctggacgccctctggaaagcccgcggcgacacgtttgacatgatctacgaggacggcaaggtcacggtcgcgcagatcatggatgacgtgcttgcagccggatatgcggagaagacgatcaagcgcggcgtgatctctgcggcacgagacgagcccaggaccacgttcgggcacatgtactcgccgcagaacatggatggcgcactgaagatcagcatcagcgcgccgtctgaggacgactacgacggcgtcgatgttgagttcgtcaatgccaacggctggatcgaagataccgtccagtgccgccttcccggcgatgtcggcaggaaggtcgaaaagatcacggccgtcggcgtgacagaccgaaaccgggcgtggcgatacggaatgcgccgccggatggcacagcgataccggagaaccgagtattcgttcgataccgggctggatgcgctgaacagcgagttctgggattacgtggctctcgccggcgatgtccccggccctggcctggcgcagagcgcctacctgaaatcgttcgtgacctcgggaaactcggttctgatcgagtccagcgagccgctcgactggtctctgctgaactcgccagcgctatacctgcgccgcccagacgggacggtttccggtggctacccagcaacccggatcgacgactaccggttgagcattcccagtatcgatttcgtccccgaggtttcctgggaaatcgaaccgccgcacctgctgctgggaaacccatacccggccctgatcagttccattgatcccaacggaaatactgcggcgtccgtccgagcggtgaactacgaccccagggtctacaccttcgacgatgccagcgcccccaactgacccgcacacgaaaacctagcccgccatagagcgggcttttttatgcttggagaaaagcatggcctacgacactggcgccttcccgctcggctcgaaagatcctcgtgtcctgtataacaacgccgagaacatggatgtcgcaatgaactcggtggagcaagagcattggatggatcgagggccacagcgcgcgccgctgcctcgctggacatactgggggatggagcagaactacaaccgcttcatctccaattccgcttgggagctccctccgctggtgtatgtcgatggctccccgctaaccgtagagcggtccagtcaggttatcgagcgcgatggaaacctctacagcgttaagttgccagcaacattccctgtcgaactctccggcacctggtccgccgacgagccgctgctggtatttcgcagtgaccagtcgctccgccaggaactcgcagagcaggacggtggcacccttgtcggctggaagcggactcaactttccgcgtcgatcgacaccattcagcaactcgcggactctattccgatccgggtctgggagttcgcgtcgctcgtctctgacaagccgtcggcggacccgtcgacctggaactggactccggcgttccaggcgatggtagataccgctgagtcctacatgcagtcatctggagcaaggcgaatcacctgctatgccgggcctggcacgtttttgattgactcaattgtgtggcgctctggtgtgcacatgtattttggaggtgctgagctaaaagcccatcctgactctatagatggaaactcgctaatcaacgcaagccttaaactaagcgatatcgggttctatggtcctggtatagttaacggtgataaggatattttcgggccggaacataggcagcacggaattcattgcgtggcaaaaagagtaaaggtaaaggatctttacattgagaatataggaagtagctcagttttctcgctgggtgatggtgtaatttttaggccaacaatcccagagggagattttcagtgcgaggactgtgaggtttcagggtgcacatttagcaatatagaaagacagtgtataaccgttgagtctgggtttaatatccgtattttgtcgaatgggttctataacagcacttactctgctgttgatattgagaatgctgggtacaccatgggagatgtcgatggtgttctctttcaggggaattatgttgatggatgcctgtatggtgttactgccgtcagtgcccagccagttgacgcgcagaggaatatcgtgtgtgtagggaatacctataagaatgtgacggatgcttataacttccgaggatgttcgaatgttaaggtaggttatggtgatattgccgaggtaagtcggtacggagcctacatctactcagatggcgttactatagcccagaatatcgaaatatctgaattcaccacatcaggagggacgtatggagtgtttgcgcaggcagttggtggtgggtctattagtagacttaaactgactaatctgaagattaccggtacttccacctcgccggtcactgtgcagagcacatctggcttgaggatggaaggggttgacgtactgatcaacaccggcacaggtgttgtgatccagaactgcgcatcgccaattgtcagaaacgtgaagatggttggcgcggtgacgctttccgttccgtcagtgtcgttcactggcaccactacgaacccgcgagttgggggctggatatctctggcttcactattggcgtttctgtcacaacttccgcgacgacgacagttcacaaactcagtgataatgtgttttcaggagttgcgaccccatggtcggtgaatcctggaaactacattaaagggcaattctctggaaccttcacaatgaatgctgccgcaagcatgaacgtcaatagtgttggcatgaatgtaacgtcatctgttgtgaggttgattcccacaaacgcggcagcagcaacgcttcaagctggctcaaaaatggcctgggtggtcaactcggcttcgagtaataacgtatcgttcagagtgcagaccgcagatggaacggcggcggctgggacggaaacttttgctttcgtgatagagaacctataactatggcgctggggcggtttaccgccccaatttttcaaaggttcgtagctacatctctgctcttaataaacacgtcgccgagtccaattcgctcaaactcatctcgatggctgacactggctttcaacatgatcgagcgaataaatgctgctgtaaggtggttccagtcagtgataaacggaacaccgtccgattcataggggcacgcggacttctcattcttgcatgtcatccctataagatcgatatactcgaatggtactgtgtagcttttgaaaagtggtaacttggttatatcctgtttttcagttgggtaagatgctatgtcacgacaaattgaggcgtctctccatgatacaaacatcgccatgaggcaagagtcgtgtttcttaccgtccatttggtagtagcttcctatgacgtatgtcttaggactttttccaacggagtggacatagtttagtatctcaaatctgaatctattcgacgaatattcaaatggtctgtgagatgtaagtattatcttctcgacggattgcattaattctttgtcgttgataatttttttgaagtctgcgcagtttgctttgtatggcgcgcccaatgggtcggactttatagctccgttttcgaattttacgtcgcacccaaggtatgaggctgaaataactctgtatttcgagtggtcaataattgagtttagcgcggatgaccagtttcgcaggtacgaatcaccaactatgaatattgtcttcgcgtcgggtgggctagcgtattcagggaccttcattgagtctgttgtgtactttgcaaggatggactcctcgtatgatctggcatctttcgagtagaccttgttcatcctgtccgggaaacctttttgaaggtgtccgtatatcccggtggcagttactagaacggatgccgcagcggcataggagagcacgcgagcgcgacttgcgccgctcttacgaaatggtttttcaacgatccaatacgaagctacggagagtgcaatggtgagcgcgatgatcaatatctgcgctgagaccgtaagctcgcccatcatcttcactttcgctagtgcaatgatcggttggtgccagagatacgcgctgtagctcagtaacccgatccagaccagaggcttgaagctgagcagggcgccaatggctgttcctgggcgtgcaaacagaatgattagtgctgtacccatcgttgggtaaagtgcatttgagccagggaatggagtcgcctgatcaaatgcgtagaccgagtatgcgatcaatgcgaggccagctatgcctccaatgtggctgccgcgaagactcggcctcttgtagaggataagagccacaatcgcgccaaccatcaattcccaggcgcgagacggaagcaggtagaatgccgtcattggctctgcggacactgttatttctgaatatataaagctcgcaaccccgattgtggcaatagttacgcatagtgcagcaaaaccaaatctccacaaaatcattataacaagtgggaaaaatatataatattgttcttctaccgctaggctccatgtgtgaagtagcggcttaagttctgctgctgagtcaaagtatcctgattcataccagaaaagaaaatttgacgagaaggttgcggtagaggcaacgctctgtgcgaaccttttcatttcttcgggcggtagcgttatccacgcgaacgggattacacacaagatcatcgtaaataggacaggaagaattcttcgcgcccggcgctcgtagaatttgagaatgcttagattgttctcctggcgttctttcaggaggatcgatgtaattagatatccgctgattacaaaaaatacatctacaccaacaaatccgccgctgaactgtgagagaccgacgtggaacaggattacaggtagtacggctatcgctcgtagaccatcgatttcagggcgatatgccaggaacttgttgtgcatcggattcccttcggttgggcgcggatcagccgcgaatgataccggctgttggggttgaacgtcatgaccgcgtcaacgcgggtactattggagaactacatgcccatcactgagcagcaactgctgcgtatttacccgaacgccggccctcgagccggcgtttttgttggtgcgttgaatcgcgggatgacgcgcttcggtatcacttcgcctgtgcgcgcggcggcgttcctggcgcagatcgggcacgagagcagccagttgagcgggctggtggagaacctcaactacagcgcccgcggactggctgcgacctggccgagccggtacctcggcgccgacggccagcccaacgccctggcgcagcgcctggcgcgcaacccccgagccatcgccaacaacgcctacgcctcgcgcaacggcaatggcgacgaggcatcgggcgacggctggcggtaccgtgggcgcgggctgctgcagatcaccggccgggcgaactaccgcgcggccggcgccgggctgggccagccgctggagcaggaacccgagcttctcgagcaaccggagtgggcggcgatctcggcggcctggtggtgggccagtcacggcttgaacgacctggccgaccgcggcgagttcgctgccatcacccgccgcatcaacggcggcctgaatggccaggcggagcgcctggcgctgtgggagcgggccaaggcggtgctgtcgtgatttctgcgcgcgtagtctcgatcgcgctggcctgcctgcttctggtcggcctcggcgccgccggaggtgtctggctcggcgcgcgacactaccggccgcagttggatgccgcgagcgcggatctggtcgcctgccgtgccgcccggggcagcctggaggcctcagtggcggagcaggtccgacaggttgccgcgctgcgcctggccgacgagcagcgcgcccgagatgccgcgcaggctgtggatcggggacggcagcaggccgcggagcagtatgccggagcccggcgcctgctgagccagcgaaccgccggcgaggagtgtgcggccaccgaggaggtcattgatcaggagctggggctttcagccatgcactccagcgcgaactgaaccgtgtaaggcgcggcccggtagagttgatgggactcgtcgcgcaggtagttgcgaaagccaggccacgacaggccgagcaactcggctgcctgacgctggctgacacctgctttgtcgaccagcccgcgcaggtagcgcgggtctggattgtggctggaggcgtcaggcttcatgcgagacattaagccactcgccgtctttcaactgcgccgctttagcgttcatttcctcgaccacggcggtaggaacgctaacaccgtatgcctcttcatatgctgaatcgtcgaactgctgtcccgcttcaacgtagaactcgaatccgccgaaatcagggttagtggtaacgatgctggtgaacgtagtcatggcttcgatccttgtttgcgcctcgccgttgcggctggcgtgggtgtagattattgggtaacaatgtacaccacaataaccgttcgtcggagtttaccatgcgttcgatgattttgattttcgcggtcgcgctggcgggatgcgccggccaggtcgagcttgagccgcgcacggtgcgcgtagaagtgccggtggcggtgccgtgccgagtgccggcggtggaagtgccggcatgggcagcggctgggctgaagaagagcgacgacctacagaccaaggtccgtgcgctgctggccgagcggcggcagcggatcgggtatgaggcccaactgctggctgccaacagagcatgccagtaggagtagactacggccttttcctacggagcatggcgatgctggttattcgattggcagggaagtggacgctgaagcttgatcggaaggtgaacgatgcgaatcgggcgggggtttggtcgttccattgctccgagagcactttcgtgcctggaatggatagcttgctgcggcatgctgccattcgtccggctgagccggcagaagggaagagcaccgaggtagaggtggccatctgtcgtcctggtgatccggaggagaagtggattccggttgggaagggcgtggcggtctacgaggcagagcgctgatttggtctcttttttcctccaaaacgctaccgtaagcatttgattctgttggcttgcggatgttctcaaatgaattgatttttgatggtgtctttcgtcataactacttgatgcatataggaaaaaacatattctatcgtgcgtcccaggctttgatgccgtagagaacgtaggtcattgcttctccccaggcccgggtcttcccgggccctgccgataggtcgccgaaaggtgatcgctggattatgccacgtcgttccgcccctgtgcggtctcggggctaccgcgctcgggagcggcgtgacggcagatagccgtggacgggcgggcggacagggagccgggctgtttccttggccgggaacggagagagcgcaggttgaacaggtcgattcggctcgctggagagcatccttaccggtactttcggaatgctccggtccgcgctgtacaatccttcccccgccgaggagatttcccatgagttgcatcggtcgccagatagaccaattacgcctgcagataccgggcttcgcctgcaagcccggctgccacgattgctgcgggccggttaccgcctcgtcggaagagatggcccgcctgccggtgaagagcgaggccgaacacgacgccgccctggccgagtggaactgcgtccatctcggaccgaacggctgcgaggcctatgaggaacgtccgctgatctgccggctgttcggcaccacgccgaacctgccctgcccggaggggcgggggcccgaagtgccggtggcggagcaggtggagcgacaggtgcatgcgctgatcgccagcactcgccaggtgctggtgtagcggcctgcccgccgctaggtttccgcggtctcggtggcgcgggactgcagggccggttcgaaggctggttcgggcggcgtttcctctaggggcatcggctcgtccgcagagagtttctggagaaccgcggcgatccgctcgatgctctcttcgagctcgagcacccggttgaccatgtacaggatcatctccggcgaactcaggtgcgccagccgcatggtcgcctgcaagtcgtcgtggcggttgtcccggtcggccatcagtgtctcagccaggctcttcagcaacagcatctcggcgcgcctcatgggccgctgctccgcgattccgcggtaggggaaaaagctcgttccatctcgcgacctacccgaaacgactacatccaaaggtgtaattctacattgccatcacttcgatcgtcggacaatagtcgcgttccagacgccttgcacaggtgacgaacgggactcgaagcggcctggtctgcatggccgggtgatgggcgagttccttgatgcggggcggcggctgtttggcgcaggacaaaaaaagccccgccgggtaggcgaggctcagggggagaacagcgtgcgggggctcgctgtccgggatgaatcgtcgtggtgcgcttagccgcagggctgctgcggaccgccggtcatgctctcgacgctgtccagtacggcatggcccttgccgaccttctgcacgtcgtcgacgtcgcgcatgatgctgccgccgtcgctcatctggttgcgggtcttgatcaggttggtggtgatgtccagcaggctgcgaccggtagcgatcaggtcattggtggcgctgggggtgcaaggggtgttggcggaggcgacctgggcctggccgggttgcccgggctgggtggtgcggtagccttgggtcagtgcgttctgctggaggcagccggaggtggcggcgaacatcgaggcgagcagcagtgcggaagtaagtcccttgcttgtcatggcggcattcctttgtctgagtgggcgctgcaccccgtactccttcggggcgtcgtcctggccgacgctacggcgggcctggactgaaggggagtgtaggagcgtctcgcaccgctatgaaatagctcggatgtactagtgcgggaaccttggccgggcgccccggtcgtcgccgcggagggggcggacgcgcggggtagagcggcggggctaggaaagaccgtacggattgtgcgaatgtcggatagctgcctaccgatcgcgatggtgcaatcggcgcagtcgcatcgtccagggacgaagccggagatccccgccctcatgcaaaccgtgtacaccgttctgaccctgctgctggtcgtcggcgccacccgcctggctgcccagttgctgcccttgccgctaccactgatccagatcgccgccggggccctgctggccttgccctccctcggactgcacattgccctcgacccggagctgttcctcttcctgttcattccgccgctgctgttcgtcgacggctggcgtattcccaagcgggaagtctggcggatgcgctggccgatcctgatgatggcgttcggcctggtgttcttcaccgtggtcggcgccggctatttcatccatctgctgatcccggaagttcccctggcggcttccttcgccctcgccgccgtgctgtcgcccacggacgccctggcggtctcggcgatcacccaggggcggctgcccaagcgcctgatgcacctgctggagggcgaggcgctgatgaacgatgcctctggcctggtggcattcaagttcgccatcgccgcggcgatgaccggcgtgttctcgctggtggacgccagcctcaacttcctcctggtcgcggtcggcggcctggccatcggggtgttcctcagctggtcgctgggccgcatccgcgcctggatgatctcccgtggctgggacgacccggcgacccacgtggtactgatgctgttgctgccgttcgcctcctacatggtggcggaacacctgggcgtctccgggattctctcggcggtggcggccggcatgatgcagagctgggtcgacctgctgccgcggcagacttccacgcgcctgctcaaccgcagcgtctggtcgatgctggagttcgccttcaacggcgtggtgttcctgctgctcggcctgcagttgccggacatcatgaagtcggtggccaaccaccacggcgacctgctctggcgttcctcgctgctgctggcctacgtggcggcgatcaccgccgtgctgatgctgatccgctacggctgggtctatggctactggaagctgtcgctgcgcatcgatcgctggcgcggcaaaagcccgcccgggctgagcggcatctccctgcgccgtctctccgccctcagtgcattgagcggcgtgcgtggtgcggtgaccctggcggcggtgctgtcggtaccgatgagcctgatggatggcagcgccttcccgcagcgcgacctgatcatcttcatcgccaccagcgtgatcctgatttccctgatcggcgcgaccatcggcctgccgctgctgctgcgcgggctgccggcgagcaacaatggcgcccacgagcgcgagcggcgcgaggcctggcgcaagacagcggaggcggcgatccgggccctggagagcgaggaattgccgcaggtggaaggcaacgatgcggcgaatacttcgcgggtcgccgaggcgcgtgcgcagatcatggccgaataccgccagtcgctggataccgcaccgaccaccgatgaggcccgcgaccaggcccaagccctggagatcgccgacaaggccttgcgcctgaaggcgttgcgcgcgcagcgcctggaactgtaccggcagcggcgcaacaacgagatcgacgacgagaccctgggcgacatcctgcgcgagctggaccagcaggaaagctggctgaccaatcgcttcgcccgctgggtgtgaacgaaaaagggatcgccgcggcgatcccttttcgtttctccgcgcaggcttcagcgcgcccgcaggtagtcgcggatgcgctcggcggcttcgacgcactcggccagtggtgccaccagggccatgcgcacgcggttggcgccggggttctcgccgtccacctcgcgcgacaggtaggaacccggcaccaccgtcacgtgctgctgctcgaacagttcgcgggtgaatacggtgtcgtccaccggggtacgtgcccacaggtagaaactgccgtccgggcgctgtacgtcgagcacgccgtcgaggatcgccagcacggcgtcgaatttctcgcggtagaggctgcggttggcgcgcacatggacctcgtcgttccaggcggcgatgctcgccaactgggtctgcaccggcatggcgcagccgtggtaggtgcggtagaggaggaatttcttcaggatctccgcgtcgccggcgacgaagcccgagcgcaggccgggcaggttggagcgcttggacaggctgtggaacaccacgcagcggctgaagtccgtgcggcccagctcggcgcaagcgttgagcaggccgggcggcggggcgttttcgtcgaagtagagttcgctgtagcactcgtcggcggcgatcacgaagtcgtagcggtcggccagggcgatcagcttcttcagggtctccagcggtaccagggccccggtggggttgcctggcgagcagaggaagagaatctggcagcgctgccaggtcgcctcgtcgaccgcgtcgaagtcggggttgaagccgttttcctcgcggcagggcaggtagtgcggcacggctccggcgagcagcgccgcgccttcgtagatctggtagaacgggttcgggctgaccaccaggccgggcgcctcgccgggctcgctgcggcggaccacggtctgggtgaaggcgaacagcgcctcgcgggtaccgttcaccggcagtacgtggcgcgccgcatccagccagccggccggcaccgagaagcgccgctcgcaccagcgcgcgatggcttcgcgcagggctggcaggccgagggtggttgggtagaccgcgagttggtccaggttctccgccagggtttcggcgacgaagctcggcgagcggtgcttgggctcgccgatggacagtgcgatcggcttcagcgtcgcgggcggccgggcgccgccgagcagggcgcggagcttctcgaaggggtagggttggaggttgtcgagtgcggtattcatggcgttggcaaggcttctcagaagtttatccgggtaggcagggtgtcccgtccgttgtcttgtgacagctgctcgaccagggcggcctgcaggcgtttgcacaggtcggggtcggcgagtggctggttgcgcgcatcggtgatgtagaagacgtcctccacgcgctcgccgagggtggcgatcttggcgttctgcaccgacaggtcgaaatccaggaagatgccgccgatccgcgccagcaggccggggcggtcgggggcgatgacttcgagcaccgagacctggcgcagcgcgtcggtggagatggtcacctgcggggcgaaggcgaagtgcttgagctggcgcggcacccggcgctggatgatggtcgggtagtcgtcggggttcttcaatgcgtcgataagcccctcgcggatctcggcgatgcgctccgggttgttgccgatggagtcgccgtcggcgtcgagcacgatataggtatcgagggtgaactggctggtggaggtgatgatccgcgcgtcctggatgctcaggttgagctggtccatggcggccacggtgaccgcgaagaaatcgtgctggtcggcggcgtagatgaagatctgcgaaccgctctcgaactcgcgctgggtggtttccttgatcagcaccagcggcgtgccgtcgtccgggtgctggaggatcgcctcggtgtgccaggccacgtcgccggcggtgtggcgcaggaagtagtcgtcgccgagctggctccataactgctcggcatcgtcctggtcgatgccgttgcgtaccagttggtcgagggccgcggtctgcgtctggcggatctgctcctcgcggtccaccgggttctccaggccgcggcgcagggcgcgcttggtctcggtgtagagctgccggagcaggctggcgcgccaggagttccagagcgtcgggttggtggcgttgatgtcggccacggtgagcacgtacaggtagtcgaggtgggtctggtcgccgaccagttgggcgaaatcgaagatcacctgcgggtcggagaggtccttgcgttgcgcggtggtcgacatcaccaggtggttctgcaccagccaggacaccagttgggtgtcccagagcggcaactggtggctctggcagaaggcctcggcgtccaccgcgccgagttccgagtggtcgccgccacggcccttggcgatgtcatggtagagaccggcgatgtagatcagttccggcttgggcagacgatcgatgatcttgctcgccagcggatatttctcggccatctccggccgattcagcttgcgcaggtgcttgatcaggttgagggtgtgggcgtccaccgtatagatatggaacaggtcgtgctgcatctgcccgatgatatggccgaactccggcaggtagcggccgaggatgccgtagcggttcatccgccgcaggttgcggtggataccctggctgctcttgaacagctcgatgaacaggctggtgttgcggatgtcgtggcggaactcgtcgtcgatcaggtgtcggctgtcgcgcagcaggcgaatggtgtcggcgcgcacgcccttgatttccgggtgctgggccatcagcacgaagatttccaggagggcgaacggggtgcgcttgaagacgttcgggtgcgtcacctcgatgtagccgtcgcgcaactggaagcgactgttcagcggttggatctgcaccggctgctcgcagggcaggatgacttcctcgaagtgctggatgatcaggtcgttcagctcggagatcgccatcaccacccggtagtacttctgcatgaagcgttcgaccgccagcttgacgtcgttgtcttcgtagccgaacagacgggcgatgctgcgctggtgatcgaacagcaggcgatcctcggcgcgcccggcgagcatgtgcagggcatagcggacccgccagaggaactcctggctggaagccagcatgctgcactcgctttccaccaggaagccttcgcgcaccagggcgtgcaggttgaggctgccgaactggcggcgggccatccagaggatggtctggatgtcgcgcaggccgccgggggagcccttgacgttgggctcgaggttgtactcggtgtcgttgtacttggcgtggcggcgctgctgttcgtggcgtttggccaggaagaactccttgctcggccacatgtgcgcgctgccggtaacccgcagcatgcgctggcgcaggctgtcagggccgcagatggtgcggcattccatgagggtggtgatcaccgtcaggtcggcgcgtgcttcctccgcgcactgctgcaccgagcgcacgctctggccgacttccaggccgatgtcccagagcagggtgaggaagccttcgatcggctcgcggaagctctcctggtcctcgctgtcgaggaggatcagcaggtcgacgtcggagtaggggtggagttcgccgcggccgtagccgcccacggcgaccagggcgatgtcggcgtcgtctccccagtcgaagcgctgccaggcctgttgcaggatctggtcgacgcaccaggcgcgatcttcgatcaggcggcggatgttgcggccgctgttgaagcggttgtcgagcacttcgcggaattgccggatggccttcttgaaggcggcgatcgggctggacttcaaggccagttccgcctggaactgcccgcgatcgaacaattcgggatccacctgcggcatgcggccttcctttatctgctagcggttgggttcgatacgcgagcgccccgtcttggtgcgtttttgcgctgtattggtgcgcgcgttgcgccgaatcggggcgtcggccccgccggaatggggcggggcgtcgaggcgcacggctggcagcaaaagccgggccggatcaggctgccgaggtgcgcgggaaggtttcgtcgttgcgcagggtgaggatctcgtagccatcggcggtgaccagcacggtgtgctcccattgcgcggacagcttgcggtccttggtgatcgcggtccagccgtcgccgagcaggcgggtctccgggcggccctggttgatcatcggctcgatggtgaagatcatgccttccttcagctcgatgccggtacccgcacgaccgtagtggaggacctgcggctcctcgtggaacaccttgccgatgccatggccgcagtattcgcggaccaccgagaagccgttcttttccgcgtgcttctggatgatttcgccgatatcgcccaggtgcgcgcccggacgcaccacggaaatgcccttgtacatgcattcctgggtgatctggcagaggcggtcggcccattccggggtcttgccgaccaggaacatcttgctggtgtcgccgtggtagccgtccttgatgacggtgatgtcgacgttgaggatgtcgccttccttcagcggcttctcgttggggatgccatggcagaccacatggttgatcgaggtgcagatcgacttgggaaagcccttgtagttcagcggggcgggaatcgccttctgctcgttgacgatatagtcgtggcagatgcgatccagctcctcggtggtcacgccgggcttgatgtgttcgccgatcatttccagcacttcggcggccaggcggccggcgatgcgcatcttctcgatatcgtcgggcgtcttgatggtgacggtcatgcgaattctcttcgggcgtgcaagcacgcatgaataataaggaatacgcgattctagcagacctgaccgaccgatctactcccgcccggccatccgcggcgggtttcactgcgtccacggttatggtataaagcgccccgctccgaggctgcggccttttccggagcacaaacccacacatgcatcgacacgatggcctgggtgcctgcaagggttggtcattgggatgcgtggaggcctaacccgacttatcgaggaactatcatgtcccaagtcaacatgcgcgatatgctgaaggccggtgtgcacttcggccaccagacccgttactggaacccgaaaatgggcaagttcattttcggcgcgcgcaacaagatccatatcatcaacctcgaaaagaccctgccgatgttcaacgaggccctgaccttcgttgagcgcctggccgctggcaagaacaagatcctgttcgtcggcaccaagcgttccgccggcaagatcgttcgcgaggaagccgctcgttgcggcatgccgtacgtcgaccatcgctggctgggcggcatgctcaccaactacaagaccatccgtcagtcgatcaagcgcctgcgcgacctggaaacccagtcccaggacggcaccttcgacaagctgaccaagaaagaagccctgatgcgcagccgtgacctcgagaagctcgagcgcagcctgggcggcatcaaggacatgggcggcctgccggacgctctgttcgtgatcgacgtcgaccacgagcgcatcgccatcaccgaagccaacaagctgggcatcccggtcatcggcgttgtcgataccaacagcagcccggaaggcgtcgactatgtaattcccggtaacgatgatgccatccgcgccgtgcaactctacctgaactcgatggccgaagcggtaatccgcggcaagcagggcgctgccaccagcgccgacgagttcgtcgaggaagcgccggccgaatccgccgaaggctgattccggggcgttcagacgtccgacggtgcgcaggaagggggctaggccccctttttgccacctttgagtttctgtccggcaggccgggcacaaaggttttttgagagctaccactcaagaggatttcgaaatggcagaaattactgcagccatggttaaagaactgcgcgagcgtaccggcttgggcatgatggagtgcaagaaggcgctgaccgccgctggcggtgacatcgagaaggccatcgacgacatgcgcgctgccggtgcgatcaaggctgccaagaaggccggcaacattgccgccgaaggctcgatcgccgtcaagatcgctgccgacaacaaggccgccgtgatcatcgaagtcaactcccagaccgacttcctggccctccaggacgacttcaagggcttcgtcgccgagagcctggaaaaggccttcaacgagaagctgaccgacgccgctccgctggtcgaagcacgtgaggaagctcgtctggccctggtcgccaagaccggcgagaacgtcaacatccgccgcctgacccgcgtcgagggcgacgtggtcggcgcctacctgcacggccaccgcatcggtgtcgtggtcaacctgaaaggcggcaacccggaactggccaaggacatcgccatgcatgtcgccgccagcaacccgcagttcctgaacgcttcggaagtttccgaagaagcgatcgcgaaagagaaggaaatcttcctggcgctgaacgccgacaagatcgccggcaagccggagaacatcgtcgagaacatggtcaagggtcgcatcagcaagttcctcgccgaagcgagcctggtcgagcagcctttcgtgaagaacccggaagtgaaggtcggcgacctggccaagcaggccggcgccgaaatcgtttccttcgttcgttacgaagtgggcgaaggcatcgagaaggccgaagtggacttcgctgccgaagttgccgctcaagtagccgccaccaagcagtaacaaagacggtttcgactgtcgccccggaagaggctgcccgctgatgcgtgcggcctcttcgtcaaatggggaagcgttcggggcagcttccgcgttgccggcccgctcggcgggctcgcacgcaacgcaggcgcaaagtcgtctccgcccacgacggcccggccgtcacgtatttttatcgccgcaggagaaaaggtcatggctcagcaactgagcgctcgtcaacctcgctataaacgcattcttctaaagttgagcggcgaagccctgatgggctcggaggagttcggcatcgatcccaaggtgctggaccgcatggcgctggaaatcggccagttggtcgggatcggcgtgcaggtcggcctggtcatcggcggcggcaacctgttccgcggcgcggccctgtccgcggccggcatggaccgggtgaccggcgaccacatggggatgctggccaccgtgatgaacggcctggcgatgcgcgatgcgctggagcgctcgaacatccccgcgctggtgatgtcggcgatctccatggtcggtgtgaccgaccactacgaccgccgcaaggccatgcgccacctcggcggtggcgaggtggtgatcttctccgccggtaccggcaacccgttcttcaccaccgactcggcggcttgcctgcgcgccatcgagatcgacgccgacgtggtccttaaggctaccaaggtcgatggcgtgtacactgccgacccgttcaaggacccgaatgccgagaagttcgagcgcctgacctatgatgaagtgctcgaccgcaagctcggcgtgatggacctgaccgccatctgcctgtgccgtgaccagaacatgccgctgcgggtgttcaacatgaacaagccgggcgcattgctgaatattgttgttggtggtgccgaaggcaccctgatcgaggagggttgagaatgatcaacgagatcaagaaggaagcgcaggagcgcatgggcaagaccctggaagcgctgggccatgccttcgcgaagattcgtaccggtcgcgcgcatccgagcatcctggatagcgtgatggtttcctattacggggccgatacgccgctgcgccaggtcgccaacgtcaccgtggaagactcccgtaccctggccctggccgtgttcgacaagagcatgatccaggcggtcgagaaggccatcatgacctccgacctggggctcaacccggccaccgccggcaccaccatccgcgtaccgatgccggccctgaccgaggagacccgcaagggctacaccaagcaggcgcgtgccgaggccgagcaggcgcgggtttccgtgcgcaacatccgtcgcgatgcgctggcccagttgaaggacctgcagaaggaaaaggaaatcagcgaggacgaagagcgccgcgccggcgacgacgtgcagaagctgaccgacaagttcatcggtgagatcgagaaggcactggaagccaaagaagcggacctcatggctgtctgaggccgggctgacgtcatggaaaagacccggaaggatgtgtgcgtgccacgccacgtggccattatcatggacggtaacaatcgctgggcgaagaagcgtcttctgcccggcgtcgccggccacaaggccggtgtcgatgccgtcagggcggtgatcgaggtctgcgccgaggcaggggtcgaggtcctcaccctgttcgcgttctccagcgagaactggcagcgtccggcggacgaagtcagcgcgctgatggagctgtttctcgtggccctgcgccgcgaggtgcgcaagctcgacgagaacggcatccgcctgcgcatcatcggcgatcgcacgcgtttccatccggagttgcaggcggccatgcgcgaagcggaagccgccactgccggcaatacccgtttcctcctccaggtcgccgccaactacggcggccagtgggacatcgtccaggccgcacagcgcctggcgcgcgaggtccagggcgggcacctggcggcggacgatatctccgccgagctgctccagggctgcctggtgaccggcgaccagccgctgcccgacctgtgcatccgcaccggcggcgagcatcgcatcagcaatttccttctctggcagctggcctacgccgagctgtatttctccgacctgttctggcccgacttcaagcacgcggcgatgcgggctgccctggcggatttctccaagcgccagcgccgcttcggcaagaccagcgagcaagtcgaggccgaggcccgtccgtcatgctgaaacaacggatcatcacggcgctggtgcttttgcccatcgcgctgggtggttttttccttctcgaaggggcgttcttcgccctgttcatcggcgcggtggtgagcctgggggcctgggaatgggcgcgcctggccggctatgaacaacagttcggccgcgttgcctacgcggcgacggtcgccgtgctgatggtcgctctctaccatctgccgcagcttgccggagccgtgctgctgctggcgctggtctggtggacgctggccaccgtgctggtgctcacctacccggaaagcgtcggctactggggcggccgctggcgccgcctgggcatgggcctgctgatcctgttgccggcctggcaggggctggtcctgctcaagcagtggccgctggccaatggcctgatcatcgccgtgatggtgctggtctggggcgcggatatcggcgcctacttctccggcaaggccttcggcaagcgcaagctggcgccgcgggtcagccccggcaagagctgggaaggcgtttacggcggcctggcggccagcctggcgatcaccctggcggtcggcctctaccgcggctggtccctcggcgcgctgctcctggccctgctcggcgcggcgctggtggtgttcgtctcgatcgttggcgacctcaccgaaagcatgttcaagcgccagtccggaatcaaggacagcagcaacctgctgcccggccacggtggcgtgctggatcgcatcgacagcctgacggcagccatcccggtattcgcggccctgctctgggccgccggctggggtgcgccatgagtcgaccgcagcggatcagcgtgctcggcgcgaccggctcgatcggcctgagcaccctggacgtcgtccagcgtcatcccgatcgttacgaagccttcgccctgaccggcttcagccgcctggccgaactcgaggcgctgtgcctcaggcaccgccccgtctatgcggtggtgccggagcaggccgcggcgatcgccttgcagggctcgctcgccgcggcgggtatccgcacccgggtgctgttcggcgagcaggcgttgtgcgaagtggccagcgcgcccgaagtggacatggtaatggcggccatcgtcggcgccgccgggctgccgtcgaccctggcggccgtcgaggccggcaagcgcgtactgctggccaacaaggaagcgctggtgatgtccggcgcgctgttcatgcaggcggtcaagcgcagcggcgcggtgctcctgccgatcgacagcgagcacaacgcgatcttccagtcgctgccgcgcaattatgccgatggcctggagcgggtcggcgtgcgccggatcctcttgaccgcctccggcggcccgttccgcgagacgccgctggagcaactcgcttcggtgacgccggagcaggcttgtgcgcacccgaactggtcgatggggcggaagatttccgtcgattccgccagcatgatgaacaaggggctcgaactgatcgaggcgtgctggctgttcgacgcccagccgagccaggtcgaggtggtgatccacccgcagagcgtgatccactcgatggtggactacgtcgacggctcggtgatcgcccagctcggcaatccggacatgcgcacgccgatttcctatgccatggcctggccggagcgaatcgattccggcgtttcgccgctggacatgttcgccgtcggtcgcctggatttccagcgccccgacgagcagcgcttcccctgcctgcgcctggcgagccaggccgcggaaaccggcggcagcgccccggccatgctgaatgccgcgaacgaggtggccgtggccgcatttctcgagcggcgcatccgcttcagcgacatcgcggttatcatcgaggacgtgctgaaccgcgaggcggtgaccgcagtcgaatcgctcgatcaggtcctggccgccgatcgccgcgcccgttcggtcgccgggcaatggttgacccgacacgccggctagtcttcggacggcctggaggtaggagatgagtgcgctttacatgatcgtcggtaccctggtggccctgggcgtgctggtgacgttccacgaattcggccacttctgggtcgcgcgacgctgcggggtgaaggtcctgcgcttctccgtcggcttcggcacgccgctggtgcgctggcacgaccggcacggcaccgagttcgtggtggcggccattccgctgggtggctacgtcaagatgctcgacgagcgcgaggcggaagtaccggcccatctgctcgaacagtccttcaatcgcaagacggtccgtcagcggatcgccatcgtcgcggctggtcccatcgccaatttcctactggcgattctgttcttctgggtcgtcgccctgctcggtagccagcaggtgcgcccggtcatcggttccgtggcgccggagagcctggccgcccaggccggcctggaggccgggcaggaactgctggcggtggacggcgagcccgtcaccggctggagcggggtcaacctgcagctggttcgccgtctcggcgagagcggtacgctggaagtgcgggtgcaggaaaagggctcgaatgtcgattccacccaccaggtgcgtctggatggctggctgaagggcgaggacaatcccgatcccatcgcctcgctgggcatccggccctggcggccggccttgccgccggtgctggccgaactcgaccccaaggggccggcgcaggccgccgggctgaagctcggcgaccgcttgcagagcatcgatggcatcgccgtcgacgactggcagcaggtggtggaaagcgtccgtgcccgtcccgggcagcgcgtccagctcaaggtactgcgcgacggcgaagtgctggatgttgccctggagctggcggtgcgcggcgagggcaaggcccggagcggctacatgggggcgggggtcgccggtaccgaatggccggcggaaatgctccgcgaagtgagctacggaccgctggaggcggtgggtcaggcgctttcccgaacctggaccatgagcctgctaacgctcgactccataaagaaaatgttgctcggcgagctctcggtaaaaaacttgagcgggccgataaccattgctaaagtggcgggcgcttcagcccagtctggcgtgggggattttctcaatttcctggcctatctgagcattagcttgggggttctcaacctgctgccgatccctgtcctcgatggcgggcatctgctgttctatctggttgagtgggtgcgcgggcgcccattatccgaacgggtacaggcttgggggatgcagatcggcatcagtctggtcgttggcgtgatgttgctcgctctggtcaacgatctgagtcgtctgtagtcatgttgaattcgaatctgccgccctttgcggcagattctctatttgtcagttggaaaaaaaggactccatgaaacgctttctgctacccgcgctgctgtcagcgctgatgatcgccgaggttcacgccgagtccttcactgtttccgatatccgggtcaatggcctgcagcgcgtgtccgccggtagcgtgttcgccgccctgccgctgaacgtcggcgagaccatcgacgaccaggccctggtccaggccacccgctccctgttcaagaccggtttcttccaggacatccagctcggccgcgatggcaacgtgctggtagtcactgtagtcgagcgcccgtcgatctccagtatcgagatcgagggcaacaaggcgatttccaaggaagacctgctcaagggcctgaaacagtccggcctggccgagggcgagatcttccagcgcgccaccctcgaaggcgtgcgcaacgagctgcaacgccagtacgtggcccagggccgctactcggccgagatcaacgcggaagtgatcccgcagccgcgcaaccgcgtcgcgctgaagatcaacatcaacgaaggcacggtcgccgcgatttcccacatcaacgtggtgggcaacaccgtcttctccgaagaagacctgaccgacctgttcgaactgaagaccaccaactggctgtcgttcttcaagaacgacgacaagtacgcccgcgaaaagctctccggcgacctcgagcgcctgcgctcctattacctggaccgcggctacatcaacatggatatcgcctccacccaggtatccatcaccccggacaagaagcacgtctacatcaccgtcaacatcaacgagggtgagaagtacaccatccgcgacgtgaagctgaccggcgacctgaaggtgccggaagaggaagtgaagcgcctgctgctggtacagaagggccaggtgttctcgcgcaaggtgatgaccaccacctccgacctaatcacccgtcgcctgggcaacgagggctacaccttcgccaacgtcaacggcgtgccggaagcccatgacgacgacaagaccgtctcggtgaccttcgtcgtcgacccgggcaagcgcgcctacgtcaaccgcatcaacttccgcggcaacaccaagaccgaagacgaagtgctgcgccgcgaaatgcgccagatggaaggcggttgggcctccacctacctgatcgaccagtccaaggcccgtctggagcgcctcggctacttcaaggaagtcaacgtcgagaccccggcggttcccggcaccgacgaccaggtcgacgtcaactacagcgtcgaagagcaaccgtccggctcgatcaccgccagcgtcggcttcgcccagagcgccggcctgatcctcggtggctcgatcagccagaacaacttcctgggtaccggcaacaaggtcagcatcggcctgacccgcagcgaataccaaacccgctacaacttcggcttcgtcgacccctactggaccgtcgacggcgtcagcctcggctacaatgccttctaccggaagaccgactacgacgaactcgacgtcgacgtcgccagctactcggtgaacagcctgggcgccggcatgagcatcggctacccgatcagcgagacctcgcgcctgacctatggcctgagcgtgcagcgcgaccagatcgacaccggccgctacaccgtggacgagatctacgacttcctcgacaaggaaggcgacaacttcaccaacttcaaggcttccatcggctggtccgaatcgaccctgaacaagggcgtgctggccacccgtggtcactcgcagagcctgaccctggaaaccaccctgccgggcagcgacctgtcgttctacaagatcgactaccgcgggcaggtcttcgccccgctgaccgacaactacaccatgcgcttccacaccgagctgggctatggcgacggctacggatccaccgagcgcctgccgttctacgagaactactacgccggcggcttcaactcggtgcggggcttcaaggacagcacgctggggcctcgtagtaccccctctagggcttacaaggatgggaagatcattcctgggcctgatgagcgtggtcgctacaccgacccggaccaggatcccgaagccttcggtggtaacatcctgatcaccggcggcgccgagctgctgttcccgctgccgttcgtcaaggaccagcgccagttgcgtaccgtgctgttctgggacgtgggtagcaccttcgataccgactgcccgaccaagaccaccaccaactgcgacggcatcaagaccgacaacctcgccagttccgtgggcgtcggcctgacctggatcaccgcgctgggcccgctgagcttcagcctggcgacgccgatcaagaagccggacaacgcggaaacccaggtcttccagttctccctgggccagaccttctgatttgtacgtagtaccgagtaacgaaaccatgctttgtgcaggagtgcatcgtgcgtaagttcacccagttcgtcctgatcaccgcagccatcatggcggctccttcggcgttcgctgaaatgaagatcgcggtgctcaactatcagatggcgctgctcgagtccgatgccgccaagcaatacgccgtggatgccgagaagaagttcggcccccagctgaacaagctgaagaacctcgagcgcgacgccaaggcgctgcaggacaagctggtttccaacggcagcaagatgtcccagggcgaccgcgagaaggccgagctggacttcaagcagaaggcccgtgacttccagttccagtccaaggaattgaacgagtcgaaggccgccgccgaccgcgacatgctgaagaaactcaagccgaagctggaccaggccgtcgaggagaccatcaagaaaggtggttacgacatggtcatcgaacgtggcgccgtggtcgacgtcaagccgcaatacgacatcacccgccaggtgatcgagcggatgaaccagctgcgttgatgatgagtaccttgtcctacaccctgggccagctggccgcgcatgtcggcgcggaagtccgtggcgacgcggacctgccgatccagggcctggcgaccttgcaggaggccggaccggctcagctgagcttcctggccaacccgcagtatcgcaagtacctgcccgaaagccgtgccggcgccgtcctgctgacggctgccgacgccgacgggttcgccggtacctcgctggtggtggccaatccctacctggcctatgccagcctgtcgcatctgttcgatcgcaagccgaaggcggccgccggtatccatcccaccgctatcgtcgcggcggacgccgaggtcgatccgagcgccagcgtcggcgcctatgcggtgatcgagagtggcgcccgcatcggcgctggcgtcagcatcggcgcgcactgcatgatcggagcccgtagcgtgatcggcgaaggcggctggctggcgccgcgggtcacgctctaccacgacgtcaccatcggcgcgcgggtgagtatccagtcgggcgcggtgatcggcggcgaaggtttcggtttcgccaacgagaagggcgtctggcagaagatcgcccagatcggcggggtgaccatcggtgacgacgtcgagatcggcgcgaacaccaccatcgaccgtggagcactgtccgatacgctgatcggcaacggtgtgaagctggacaaccagatcatgatcgcgcacaacgtgcagatcggcgatcataccgccatggccgcttgcgtcggcatttccggcagcgccaagatcggcaggcattgcatgctcgccggcggcgttggcctggtcggccatatcgagatctgcgacaacgttttcgtgaccggcatgaccatggtgacccgctcgatcaccgagccgggatcgtattcctccggtaccgccatgcaaccggcggccgaatggaaaaaaagcgccgcgcgcattcgtcaactggacgacatggcgcgtcgacttcagcagctggaaaaacgcctggctgccgtgacctcaagcggtgacgcttcatctgatgcgtaattgacgttttttgcgtcacccttttctgaacaggctccccctaacatgatggacatcaacgagattcgcgaatacctgcctcatcgctatcctttcctgctggtggatcgggtggtagagctggacatcgagggcaagcgcattcgcgcctacaagaatgtcagtatcaatgagccgttcttcaacggacatttccccgagcacccgatcatgccgggcgtgctgatcatcgaggcgatggcccaggcggccggtatcctcggtttcaagatgctcgacgtgaagcccgccgacggcactctttactacttcgtcggttcggacaagctgcgcttccgccagccggtcctgccgggcgaccaactgcaactgcacgccaagttcatcagcgtgaagcgcagcatctggaaattcgactgccacgctaccgtcgacgacaagccggtatgctcggctgaaatcatctgtgcggaacgcaaactatgagtttgatcgatcctcgcgccatcatcgatccgagcgccaggctggcggctgacgtccaggtgggcccgtggtccatcgtcggggcggaagtggagatcggtgaagggacggtgatcggtccgcacgtggtgctcaagggccccacgaagatcggcaagcacaaccgcatctaccagttttccagcgtcggcgaggatactcccgacctgaaatacaagggcgagccgacgcgcctggtgatcggtgaccacaacgtgatccgcgaaggcgtgaccatccatcgcggaaccgtccaggatcgcgcggaaaccaccattggcgaccacaacctgatcatggcctatgcgcacatcggccatgacagcgtgatcggcaaccattgcatcctggtgaacaacacggcgctggccgggcatgtccacgtggacgactgggcgatcctgtccggctacaccctggtgcaccagtactgccggatcggcgcgcacagcttttccggcatgggcagcgccatcggcaaggacgtcccggcctacgtgacggtcttcggcaacccggccgaagcccgcagcatgaacttcgaaggcatgcgtcggcgcggcttcagcagcgaggccatccatgccctgcggcgtgcctacaaggtggtctatcgccagggacataccgtcgaggaagccctggccgagctggccgaaagcgctgcccagttccccgaggtcgcggtgttccgtgattccatccagagcgcaacccgcggcatcacccgctgagccatggctgacggattacgcgtagccctggtcgccggcgaggcctccggcgacatcctcgggtccggactgatgcaggcgctgcgggcgcggcacccggatatcgagttcatcggcgtcggtgggccgcgcatggaggccgaagggctgtccagctatttccccatggagcgcctgtcggtgatgggcttggtcgaagtgctgggcaggctgccggagttgttgcgacggcgcaagcggctgatccgcacgctcatcgaggcccggccggatgtgatgatcggcatcgatgctcccgacttcaccctcggcgtcgaacacaagctgcgccaggctggcctgcgcaccgtgcattacgtcagcccttcggtatgggcctggcggcagaagcgggtgctgaagattcgcgaagcctgcgacctgatgctggcattgttccccttcgaagcacgtttctacgaagagcatggggtgcctgtgcgtttcgtcggccaccccctggccaacaccattcccctgcaggcggatcgcgctgcggcccgcgcgcggctcggattgccggcggacggacaggtgctggcgctgatgccgggcagtcgcggcggcgaggtcggcaagctcggcgccttgttcctcgacaccgcccagcgtctgctcgtcgaacggccgggcttgcgtttcgtgctgccctgcgccagcgctgcacggcgcgaacagatcgagcagatgctccagggccgcgagcctctgccgctgacgctgctcgacggtgcgtcccatgaagcgcttgccgcctgcgatgcggtgctgatcgcctccggtaccgcgaccctcgaggcgctgctctacaagcggcccatggtggtggcttatcgggtcgccgggctgacgtaccggattctcaagcgcctggtgaaaagcccgtacatctccctgccgaacctgttggccggacgcctgttggtgccggaactgatccaggacgccgccaccccgcaagcgctagccgcaaccctctcgccgctgctggacgacggctcgcagcaggtggaattcttcgatgccatccatcgggccttgcgccaggatgcctcggcacaggcggcggaagccgtcctgcaactggtggagcgccgctgatgcaactgggtctggatttcaatctggtggaggatctggtcgcgggcgtcgacgaggtcggtcgcggtccgttgtgcggcccggtggtcaccgccgcggtgattctcgacccgagccgcccgatcctcggcctgaacgactcgaagaagctcagcgaagcccgccgcgaggcgctgttcgaagagatccgcgagaaggccctggcctggtgcatcgcccgcgccgaggtcgaggagatcgaccggctgaacattctgcatgccaccatgctcgccatgcagcgcgcggtcgaaggcctcagcgtgactccgcggctggccctgatcgacggcaatcgttgtccgaaactggcggtgccctgcgcgccggtggtcaagggcgacagccaggtgccggcgatcgctgcggcgtcgatcctggccaaggtcagtcgcgaccgggaaatggtcgagctggaccgggtctatccgggctatggcatggccgggcacaagggatatccgaccgcggtccatctcgaggcgctttcccgcctcggcccgacgccgatccatcgacgctcgtttgcgccggttcgcgaattgctggacgtctctgttcaataattgaacggatgtcgcgtgactgaccgtatctgtcgcctggtgacaagcggcgagcgacgtcaatagcggaaagtcctgccccttcctgccaagtgccattcacagcgaaatttccttcggctcgcacgtcattccgtgtgtgtccgaaacacgcggccttctacccgggaggtcggctgacaacaatccgccacaagcggaacaggggagttatccatgcaagaattcgccactcaggtcgtcgacctgctcaacggccttatctggggcaagatcctcatctggctgctggtcggttgcggcctgtacttcaccgtgcgcctggggctgatccagttccgccacttcggtcataccttcagcgtgctcaagggcagccgccagtcggacgactcgggaatctcctcgttccaggcgctctgcacctctctggcggcgcgggtcggtaccggcaacgtcgccggcgtggcggtagcgatcacgctcggcggtcccggcgcagtgttctggatgtgggcgatcgccctggtggggatggcgaccggcttcgtcgaggcgaccctggcccagttgttcaagattcgcgacgacaagggccagttccgtggcggcccggcctactacatggagaagggcctgggcgcgcgctggatgggcatcctgttctcgatcttcctgatcatcgccttcggtttcgtcttcaactcggtgcaggccaataccatcaccggtgccatgcagggcgccttcggcgtgccgacctggatcagcggcatcgccgtggtgatcctcaccgcgttgatcatcttcggtggcctgcgttccatcgcgcgcttctccgaactggcggtacccttcatggcggtggcctacctgctgctggcggtgggcatcatcctgttcaacctcagcgaactgccgggcgtcctggcgatggtggtgaagagtgccttcggctggcacgaggccgccgccggcggcatcggcgcggcgatcctcaacggcttcaagcgcggcctgttctccaacgaagcaggcatgggctcggcgcccaacgccgccgcctcggccacgccctatccgccgcacccggcgtcccagggctacgtgcagatggccggcgtgttcatcgataccctgctgatctgtaccgcttccgccgccatcatcctgctggccggaccgcaggaaggcgagggcatcatgctggtgcagaatgccctgaccagccaggtcggcgactggggccgctatttcctggcggtgatcatcctgttcttcgccttcacctcgatcgtcgccaactacttctatgccgagaactgcctggtattcctcgagcacaaccacctggcgggcctgttgatcttccgtctgatcgtgctggcgatggtgatgttcggcgcgctggcttcgctgccgttcgtctggaaccttgccgacgtgtcgatgggcctgatggcgatcaccaacctgatcgccatcctgctgctgtccaacctcgcgatcaagctggccaaggactacaacgcccagcgcaaggccggcaagctgccgaccttcgacgccagccagttcccggaagtccagcagaagctcgagccgggcatctgggacgaccgccgcgcctgagcgcggggcgggcgaggcttctcggcgcagccgaggcgcatcgtccgctcttgaacctgtagctttgccaccgggcccggtacaatccgggccttgtcgtttttgcgttatttctgctccggggccttcatgaccgtatccttcgttcacctgcgtctgcataccgaattctccctggtcgacggcctggtccgggtcaagcccctggccaaggcagtggcagggctgggcatgccggcggtggcggtcaccgaccagagcaacatgtgctcgctggtgaagttctacaagaccgccatgggcgccggcatcaagccgatctgcggggccgacatctggctcgccagccgcgaggaagatggcccgctcagtcgcctgagcctgctggcgatgaacgcgaagggctatcgcaacctcaccgagctgatttcccgcggttggagcgaaggccagcgcaacggcgagatcatcatcgagcgcgactgggtcaaggaggcggcggaaggcctgatcgcgctgtccgcggccaaggagggcgagatcggccacgcgctgctcgacggcgaggaagccaaggccgaggcgctgttgcgcgagtggatggaggtgttccccgagcgcttctacgtggaagtgcaacgtaccagccgggtcaacgacgaggagcacctccacgcggcggtggctttggcgtcacgctgcaacgcgccgctggtggcgaccaacgacgtgcgcttcatcaagcaggaagacttcgaggcccacgagacccgcgtctgcatcggcgaggggcggaccctcgacgatccgcggcggccgcgtacctattcggaccagcaatacctgaagtcgccggcggaaatggccgagctgttcagcgacctgccggaagcgttggaaaacaccgtcgagatcgccaaacgctgcaacatcgaggtgcagctgggcaagtacttcctgccggacttccccacgcccaatggcatgggcatcgacgactacctgcggcacgcctccttcgaaggtctcgaggagcgcctggaggtgctgttgccgaaggacaccccggactacgaggccaagcgccaggtctatgtcgatcgcctgaacttcgaactcgatatcatcatccagatgggtttccccggttacttcctcatcgtgatggacttcatcaagtgggcgaagaacaacggcgtaccggtaggccccgggcggggctcgggcgccggctcgctggtggcctacgtgctgaagatcaccgacctcgatccgctggcctatgacctgctgttcgaacgtttcctcaacccggaacggatctccatgcccgacttcgacgtcgacttctgcatggagggccgcgaccgggtgatcgactacgtggccgacgcctacgggcgcaacgcggtgagccagatcatcaccttcggcaccatggcggcgaaggcggtggtacgcgacgtggcgcgggtccagggcaagtcctacggtctcgccgaccggctgtcgaagatgatcccgttcgaagtcggcatgaccctggataaggcctacgagcaggaagaaatgctccgcgacttcctcaagagcgacgaggaagccgccgagatctgggagatggccctcaagctggaaggcatcactcgcggtaccggcaagcacgccggtggcgtggtgatcgcgccgaccaagctgaccgacttctcgccgatcgcctgcgacgaggaaggcggcggcctggtgacccagttcgacaaggacgacgtggaggcggccggcctggtgaagttcgacttcctcggcctgcggaccctgaccatcatcaagtgggcgatggagatcatcaaccgcgagcaggccaagaagggcctggagccggtgaacatcgacttcatcccgctggacgacaagccgacctattcgctgctgcagaaggccgagaccactgcggtgttccagctcgaatcgcgcggcatgaaggagctgatcaagaagctcaagccggactgcctggaagacctcatcgcactggtggcgctgttccgcccgggtcctctgcagtcgggcatggtggacgacttcatcaaccgcaagcacggtcgcgccgagctgtcctatccgcaccccgattaccagtacgccggcctggagccggtgctcaagcccacctacggcatcatcctgtaccaggaacaggtgatgcagatcgcccaggtcatggccggctataccctcggtggcgcggacatgctgcgccgggcgatgggcaagaagaagcccgaggaaatggccaagcagcgcggcggtttcatcgagggttgcaagaacaacggcatcgatgccgacctcgcgggcaacatcttcgacctggtggaaaaattcgccggctacggcttcaacaagtcgcactcggcagcctacggcctggtctcctaccagaccgcctggctgaagacccacttcccggcgccgttcatggccgcggtactcaccgcggatatgcagaacaccgacaaggtggtgacgctgatcgaagaatgccggcacatgaagctgcgcatcgtggcgccggacgtgaacaactccgagttccgcttcaccgtcgacgacgatggccggatcgtctatggcctgggcgcgatcaagggcgtcggcgaggggccggtggaggcgatcaccgaatgccgcgccgaaggcgggccgttcaacaccctgttcgacttctgcgaccgcgtcgacctgaaacgcatcaacaagcgcaccctggaagcgctgatccgcgccggtgcgctggatcgcctggggccgcactaccacgacgagctaaaggcctaccaggctaccgtcgacctcaaccgcgccgtgctgctggcggcgatggaggaagcgatccaggccgccgagcagaccgcgcgcagccacgacagcgggcacatggacctgttcggcggagtcttcgccgagccggaggcggatgtctacgccaaccaccgcaaggtcaaggagctgaccctcaaggaacgcctgaagggcgagaaggacaccctcggcctgtacctgaccggccatccgatcgacgagtacgaaggcgaggtgcggcgcttcgcccgccagcgcatcgtcgagctgaagccggcgcgcgatacccagacggtggccgggctgatcgtcaacctgcgggtgatgaagaacaagaagggcgacaagatgggcttcgtcaccctcgacgaccgctccggacggatcgaggcctcgctgttctccgaagccttcgccgcggcccagtcgctgctgcagaccgacgcgctggtggtggtcgagggcgaggtcagccaggacgacttctccggcggactgcgcctgcgcgccaagcgcgtgatgagcctggaggaggcgcgtaccggcctggcggagagcctgcggatgaagctgcacgccgacctgttgaagggcgatcgcctgcgctggctgggcgagctgttcaaccgccatcgcggttcctgcccgatcaccctggactacaccagcgccgacgccaaggccctgctgcagttcggcgagagctggcgggtggatccggcggacgatctgatccaggcattgcgtgaccagttcgggcgcgacaacgtcttcctcaattatcgttaatcgcgatgggcgataacgccgttgttccgcgctctgcggcgggaaaacgcggatcgcccttgctcccggctcgacccctggcgcccgatcccgtaaggtagggcgccaaacggaaacggcccactagaatctgcgcacgacggaagcctatgaacccgaactttcttgatttcgaacagccgatcgccgacctgcaagccaagatcgaagagctgcgcctggtgggcaacgacaatgcgctgaacatcagcgacgaaatctcgcgtctgcaggacaagagcaaggcgctcaccgaaaacatcttcggcaatctgtccagttggcagatcgcccagctcgcgcgccatcccaagcgtccctataccctcgactacatcggctacctgttcagcgatttcgaggaactgcacggcgaccggcatttcgccgacgacccggcgatcgtcggtggcgttgcccgcctcgacggttccccggtgatggtcatcggccaccagaaaggccgcgaagtccgtgagaaggtccggcgcaacttcggcatgccgcgtccggaaggctatcgcaaggcctgccgcctgatggaaatggccgaacgcttcaagatgccgatcctcaccttcatcgacacgcccggcgcctacccgggcatcgatgccgaggaacgcggccagagcgaggcgatcgcctggaacctgcgggtgatggcgcgactgaagacgccgatcatcgccaccgtgatcggcgagggcggttccggcggcgcgctggccatcggtgtctgcgaccagttgaacatgctgcaatactccacctattcggtgatctcgccggaaggctgcgcctccatcctctggaagaccgccgagaaggcgccggaagccgccgaggccatgggcatcaccgccgagcgcctgaaaggcctgggcatcgtcgacaaggtcatcgacgaaccgctgggcggcgcccatcgcgatccggcgagcatggccgaatcgatccgtggcgaactgctggcgcaactgaagatgctccagggcctggaaatgggtgagttgctggagcgtcgttacgaccgcctgatgagctacggcgcgccgtaagccatccggcgcactggtacgatcgacaagcccggcattcgccgggcttgtcgcatgaggagcgcaagcatgccggcggtgccgctcgaatcccgtctgttacaggccctggcgccctggcgcgaagcggggggctggtgcgtggcgttttccggcgggctggattccacggtgttgctgcatctgctcgcccaactggcccggagcgaagccttgccggcgctgtcggcgctgcatgtccaccatggcttgcaggctgcggcggacggttggccggcgcactgccaggtggtctgccggtcgctgggtatcccgctgcgggtcgagcgggtgcaggtcgccgttggcggcagcatcgagcaggcggcgcgcgacgcccgctatcgcgcattccaggcgaacctgggcgagggacaggtgctgctcaccgcgcagcacctcgacgaccaggccgagaccctgctgttccgcctgttgcgtggagcgggcctgcgcggcctggcggcgatgccggcgagccggccgctgggcggcggccgcctgtgccgacccttgctcggggtttcccgcgccgaactggaagcctatgcgcagacgcaccggctggactgggtggaggatccttccaaccaggatccgcgcttctcgcgcaactacctgcgccgggagatcatgccgcgtctcgcctcccactggccgcaggccgtcgccggcatggcgcgctgcgcggcgcatctgcgcgaggccgaagacctgctggctgaactggccgccatcgacctccgggcctgccgccaaccctcggaactggattggccggactggctggatctgccccggatcgccctggagcctctgcgccgcctcagcgctgcgcgccagcgcaacctgctgcgggcctggctggggcagctgacgcggttgccggacagtgaccactgggccggctgggagtcgttgcgcgatgccggcgacgatgccgacccgatctggcgcctggagagcggcgagctgcgtcgcggcgcggggcggatctggtggttgccggcggactggcgggcggcggcgggaccgttcgtctgggagcgtcccgctcatccattgcttcttcccggcaatggtcggctggcgttgctcggcgaggttccggcggggccgttgcgcgtcgactaccggcggggtggggaggtgctggccctggccgggcgcggtcgccgcgacctcaagcgattgctcaacgaagcgggcgtaccgagcttcctgcgcggtcgtttgccgctgctcttccgagccgacgaactgctcgcggtggccaacattcctggcctggacagtccccgcgaggggggctggcgactgtcctggagcccgccgacgaacgacccgggtttgagctagtaagccgtttccagtagactacgctcccgtcttgtactgctcccgccgattccctccggaatcagcaggagtttgctttgcccacggatttgtccgtggcgggagctggcctcccttctccgaatccccggcggttgatcccgcctaaacgctgacttctagggtttttcatgacgcgctacatcttcgtcacgggtggtgttgtttcttcattggggaaaggcatcgcttcggcttctctggctgcgatcttggaagcgcgtggcctgaagatcacgatgctcaagctggacccttacatcaacgtggacccgggcaccatgagcccgttccagcacggtgaggtcttcgtgacccaggacggcgccgagaccgacctggacctgggccattacgagcgcttcgttcgtaccaccatgacccagaacaacaacttcaccaccggccgcgtctacatggacgtgttgcgcaaggaacgccgcggcgactacctgggcgccaccgtgcaggtgatcccgcacatcaccgacgagatcaagcggcgcatcatcaagggcgccggcgatgccgacgtcgccctggtggagatcggtggcaccgtcggcgacatcgagtcgcagccgttcctcgaggcgatccgccaactgcgcgtcgagatcggcgccaagcgcgcgatgctgatgcacctgaccctggtcccgtacatcgccaccgccggcgagaccaagaccaagccgacccagcactcggtcaaggagctgcgctccatcggcctgcaaccggacgtgctggtctgccgttccgaccacccgatcgacgtctcctcgcggcgcaagatcgcgctcttcaccaacgtcgaggagcgcgcggtgatcgccctggaagacgtcgacaccatctaccgcatcccgtcggtgctgcatgcccagggcctggacgacatcgtcgtcgagcgcttcggcctggagtgcgggcaggccgacctgtccgaatgggaccgggtggtcgatgccaagctcaaccccgagcgtgaagtcaccatcgccatggtcggcaagtacatggaactgctggacgcgtacaagtcgctgatcgaggcgatgacccacgccggcatccagagccgcaccaaggtcaacctgcgctacatcgactccgaagacatcgagcagcagggcaccagcctgctggaaggcgtcgacgccatcctggtcccgggcggcttcggcctgcgcggcgtggaaggcaagatcagcaccgtgcagtacgcccgcgagaacaagatcccctacctgggcatctgcctgggcatgcaggtcgcggtcatcgaatacgcccgcaacgtgctcggctggagcgacgccaactccaccgagttcgacaagtccagcggccatccggtggtcggcctgatcaccgaatggcaggacgcgaccggcgccaccgagatccgcaccgaagcttccgacctgggcggcaccatgcgcctgggcgcccaggagtgccagctgcagaccggcaccctggtgcacgactgctatgccaaggacgtgatcgtcgagcgccatcgccatcgctacgaagtgaacaacaacctgctgccgcaactggaacaggccggcctgaagatttccggccgctccggcgacggcgccctggtggaagtggtcgaggccccggagcatccgtggttcgtcgcctgccagttccacccggagttcacctccacaccgcgtgatggccacccgctgttcagcggtttcgtcaacgccgcgctgaaatattccgggaaggcctgagcatggcacagaagatcgttcgcgtcggcgatatccagatcggcaacgacctgccgttcgtgctgttcggcggcatgaacgtgctggagtcgcgcgacctggccatgcaggtctgcgaagaatacgtacgggttaccgagaaactcggtatcccctatgtgttcaaggccagcttcgacaaggccaaccgttcctcgatccactcgttccgtggtccgggcctggaagagggaatgaagatcttcgaagagatcaagaagaccttcaaggtaccggtcatcaccgatgtccacgagccgttccaggcccagccggtggccgaggtctgcgacatcatccagctgccggccttcctctcgcgacagaccgacctggtggtggcgatggccaggaccaacgcggtgatcaatatcaaaaaggcccagttcctcgcgccccaggagatgaagcacatcctgaccaagtgcgaggaagccggtaacgaccgcctgatcctctgcgagcgcggctcctccttcggttacaacaacctggtggtcgacatgctcggcttcggcatcatgaagcagttcgagtacccggtattcttcgacgtcacccacgccctgcagatgcctggcggtcgcgcggactccgccggcggccggcgcgcccaggtcaccgacctggccaaggccgggctcagccagaagctcgccgggctgttcctcgaggcccatccggaccccgagcacgccaagtgcgacggtccgtgcgcgctgcgcctgaacaaactcgaagccttcctgtcccagctcaagcaactggacgagctgatcaagagctttcctgcaatcgagactgcctagtctcctcagaccgccccgttcattcacttcggagtgttaacaagaatggcaaagatcgtcgacatcaagggccgtgaggtcctggactcccgcggcaaccctaccgttgaagcggacgtgatcctggacaacggcatcgtcggcagcgcctgcgcgccttccggtgcttccaccggttcccgcgaggccctcgagctgcgcgatggcgacaagagccgttacctgggcaagggcgtgctgaaagccgtggccaacatcaacggcccgatccgcgacctgctgctgggcaaggacgcggccgaccagaaagccctcgaccacgcgatgatcgagctggacggcaccgagaacaaggccaagctgggcgccaacgcgatcctcgcggtgtccctggctgccgccaaggccgccgcacaggccaagggcgtaccgctgtacgcgcacatcgccgacctcaacggcactcccggccagtactccatgccggtgccgatgatgaacatcatcaacggcggcgagcatgcggacaacaacgtcgatatccaggaattcatggtccagccggtcggcgcgaagaacttcgccgaggcgctgcgcatgggcgccgagatcttccatcacctcaaggccgtgctgaaggcccgtggcctgaacaccgccgtcggtgatgaaggcggcttcgcgccgaacctgtcgtccaacgaagacgccctggccgccatcgccgaggccgtcgagaaggccggctacaagctgggcgacgacgtgaccctggccctggactgcgcctccagcgagttcttcaaggacggcaagtacgacctggaaggcgaaggcaaggtattcgacgccgccggtttcgccgactacctggccggcctgacccagcgctacccgatcatctccatcgaggacggcatggacgagtccgactgggccggctggaaaggcctgaccgacaagatcggcgccaaggtccaactggtcggcgacgacctgttcgtgaccaataccaagatcctcaaggaaggcatcgagaagggcatcggcaattcgatcctgatcaagttcaaccagatcggttcgctcaccgagaccctggaagccatccagatggccaaggccgccggctataccgcggtgatctcgcaccgctccggcgaaaccgaggactcgaccatcgccgacctggccgtgggtaccgccgccggtcagatcaagaccggttcgctgtgccgctccgaccgcgtgtccaagtacaaccagttgctgcgcatcgaagagcaactgggcgccaaggcgccgtaccgtggtcgcgcggaattccgcggctgagcctagtctggtacggtgaaggggtggcaagagccaccccttttcttctcaaggagttcgaggcttgaggttacgtagcccctactggctgttcgtggtgctgatcctggcgctggcgggcctgcaatatcgcctgtgggtcggcgatggcagcctggcgcaggtgcgcgacctgcagaagcagatcgccgaccagcatggcgagaacgagcgcctgctggagcgcaaccggattctcgaagccgaagtcgccgagctgaagaaaggcaccgagaccgtcgaggagcgtgcgcggcacgagctcggcatggtcaaggacggcgaaaccctctaccagctcgccaagtgagctgacgacccttctcccgatgacgacttccgaccttcccgccttctggacggtgatccccgccgccggcgtgggttcgcgcatgcgcgccgaccgcccgaagcaatatctcgatcttgccggtcgcaccgtgatcgagcgcaccctcgattgtttcctcgaacacccgatgctcaggggcctggtggtctgcctggccgaggacgatccctactggcccgggctggactgcgccgccagccggcatgtgcagcgcgccgccgggggcgccgagcgcgccggctcggtgttgagcggcttgctgcgcctgctggagttgggggcacaggccgacgactgggtgctggtgcatgacgccgcgcggccgaacctgacccgcggcgacctcgaccgcctgctcgaagaactcgccgaagatccggtcggcgggctgctggcggtgccggcgagggacactctcaagcgctccgaccgcgacggccgggtcagcgaaaccatcgaccgctcggtggtctggctggcctatacgccgcagatgttccgcctcggcgccctgcaccgggcgctggccgatgcgttggtggccggcgtggcgatcaccgacgaggcttcggcgatggagtgggccggctatgcgccgaagctggtggaagggcgcgccgacaacctgaagatcaccaccccggaagacctgctgcgcctgcagcgcagttttccgcactgaaccctggcacaagaaagccgacccgagggtcggctttcttgtcgttgcaggctcgctcgttcagctttccagcggcacctctatgaggaagcggaacagcgcgccatgctgctccaccgccaggcatttgtagccctggcgctgggtatcttcgggaatcccgtggaccgattgcgagcagtcggtgaccacttccaggcgttcgcccggctgcatggtcgccagggtttccagggtggcgatggcgttgtacgggcaatgttcgccgcgcaggtcaagcgacagggtcggtttgtcggtctggctcatggttcggtttccgcggtcgggtgaatcgggaggcgttcagttgcaccagcagcaggcacagggccaggccggcgaaggtcaatagcaggccgttgccgggcccgaagctttccagcaggttgagcttgggatagggcagggcgaggcgggtgcccaactggtcccaaaagatcgccaccagggttccgccgatgacgttgccgatgccgaccacccagaagtgcacctggccctccatcgagcggtacatccagccggtctcgcaaccgccggcgaggacgatgccgatgccgaagagaatgccgccgatgatcgcattcgggcccatccagaagatcttcggcgcgacgcccaggcggatcgtggcgaaggtaccgatgcaggcggccgccatgccgagcaggatgccgaaggcggcgcgggtccggccggtggtccagaggtcccgtgcggcgctggtgaagcagatctgcgcgcgctcgatcaggccgccgaacagcaggccgaacaggcaggccatgcccagcaccagcgatacctcgaagcgccaggcggcgaacagcgcggcgagcgctagcaccgccaggcccaggcgggcctgcaggcgtgcgcgtcgggccaggctttcggcgtcgggcagggcgctggccgtggcgccgactttcagcggcgtgcgcaggaacggcagcaggctgatcttcacgccgatccaggcgccgccgacggtggcgaacatgaaggcccaggcgtgcagggaaaacatcgggataccggtgaagaacgccgccaggttgcagcccatcgccaggcgcgcgccgaagccggcgacgataccgccgaccaggccctgcagcaggcggcgtttgctggtcggccagcgcaggctgacgttgccggcccagagggcgcagcacagggcgccgaggaacatgccgatgatcatcactccgtcgatccggtccagcggcgtgccttgaaggccgatcagcctgaagtagctccagtcctgtggctggtagccgaaccaggacagcacgtggccgccccagcgggtgaactcgccggtcaccgcccagaaggtgccggtgagcgcgaagtagtaggcggaggcgacgccgagggcgaccagcgccggcagcggcgaccagaacctcaccaggtagcgttggcgaaacgcattgagggcagacatgcgacttccttgaatcgatagcgggtggaacgggaaaccgccaagtctatcgcagcggcgaaacgccttactgcttcagcgcaggtttttctccccggcgagtcccggatgggattgcgccaggccttccttgagatagtccaccagttgccggactttcggcgacaggtgccgctgctgcgggtacagcgcccataccgcggtattcggcggctggtggccttccagcaaggagaccagacggccgctgcgcagatgctcgatcacatagtagtcgggcagctggcacaggccgaagccgcgcagggcggcgtcgagcaccgcctggccgctgttgcagcgccagttgccctggacccggtgctgggtttcccggccgtcctcgaggaagctccacaggtcgctgctgccgatcaggcaattgaactggccgagttccgtcggcgactgcggagtgccgtggcggcgcaggtattccggggtggcgcagaggtacatgaggcgtggcgccaaccgtgtggcgaccaatcgcgaatcgctcaggcggccgaggcggatggccaggtcgaagccctcgtggagcaggtccagttggcggttggacagctcgatgtcgacccgcagttgcggatagtcggccatgaaggcattcaccagcggcacgatgaaacgttcgccgtaggctaccgcgcaggtcatgcgcagcaggcccttgggctccgcggagaggtcgctgaccgcgcgcagggcttcgtcgcgggcgtcctgcaggcgctggcaatgttgcaggaaggtctgtccggcttcgctcagcgacactcgccgggtgctgcggtagagcaggcgggtctgcaggcgctcctccaggcgggcgacctggcggctgatgtgcgacgaggaaacgcccatgcgttcggctgccgcggtgaactgcccggtttcggcgacagcgacgaattcgtcgagtccttcccagcgattcatctggattgtccctgtatggcaataatgttttgattattgcctgattattccttgaaacgcggttttctacactttccgtttcagtgggtcgcttagcggcccgccggcttccatcgttcaggagttcccagatgatcaagtcccgtgccgccgtcgccttcgcccccaacaagccgttggaaatcgtcgaggtggatgtggcgccgccgcagaagggcgaggtactggtgcgcatcgtcgccaccggcgtctgccataccgacgcgtacaccctgtccggccaggattccgagggggtgttcccgtgcatcctgggccacgaaggtggcggtatcgtcgaagcggtgggcgagggcgtgacctccctgcaggtgggcgaccatgtcatcccgctctacaccgccgagtgcggcaagtgcaaattctgcctgtccggcaagaccaacctctgccaggccgtacgcgccacccagggcaagggcctgatgcccgacggcaccagccgtttctcctacaagggcgagccggtcttccactacatgggctgctcgaccttctccgaatacaccgtgctgccggaaatctccctggcgaagattcccaaggatgccccgctggagaaggtctgcctgcttggctgcggcgtcaccaccgggatcggcgccgtgctgaataccgccaaggtggaagagggcgctaccgttgccatcttcggcctgggcggcatcggcctggcagcgatcatcggggcgaagatggccaaggccgcgcgcatcatcgcggtcgacatcaacccgggcaagttcgatatcgccagggaactgggcgccaccgacttcatcaatccgaaggactacgacaagccgatccaggacgtcatcgtcgaactgaccgatggcggcgtcgactactccttcgagtgcgtcggcaacgtgcagttgatgcgcgccgcgctggaatgctgccacaagggctggggcgagtcggtgatcatcggtgtcgccggtgccggccaggaaatcagcactcggccgttccaactggtcaccggccgcgtctggcgcggttcggcgttcggcggggtgcgcgggcgcagcgagttgccgagctatgtcgagaaggcgcagaagggcgagatcccgctggataccttcatcacccacaccatggggctggaggacatcaacgaggccttcgagctgatgcacgaaggcaagagcatccgcaccgtcattcattactgacaagccgtcgcggcgggccctgcggctcgccacgaccgtttcacggaggtcacgtgaaggattccctcgaactgatcggcagccagaagaccttcggcggctggcaccagcgttaccgtcatttttcccggaccctgaactgcgagatggtcttcgccatctacctgccgccccaggccgagccggaggcggcgctgccggccctgtactggctgtccgggctgacctgtaccgacgagaacttcatgcagaaggccggcgcccagcgggtcgccgccgaactgggattggtactggtggcgccggataccagcccgcgcggcagcggtgtccccggcgatcccgacggcgcctgggacttcggcctgggcgcaggcttctacctgaacgccacgcaggagccctgggccgcgcactaccgcatgcacgactacgtggtgcacgagttgccggcgctgatcgaggcgcatttcccggtgtcccggcggcgcggcatcagcgggcactcgatgggtgggcatggcgcgctggtttgcgcgctgcgcaacccggggcgctacctgtcgctgtcggccttcgcgccgatctgccatccgagcgattgtccctggggccagaaggcgttctcccgctacctgggcgaggacccggcggcctggcgcgagtgggatgcctgtgcgttgctcgagggtgcgtccgaacgcttgccgatcctggtcgaccagggcgagcgcgacgacttcctcgccgtccagctcaagccggaagcgctacgcaatgcggcggacaaggccggccacccgctggagctgcgtctgcaaccaggttacgaccacagctactacttcatcgccagtttcatcgaggatcacctgcgccatcatgccggggttctcaacggttgatccgcgatacctgaagcctgtcccgatccggggtagaatcacgccctgattccaaccagggcgttttttcatgcgaattggccatggctacgacgtgcatcgcttcggcgagggtgacttcatcaccctcggcggtgtgcgcattccccataaacatgggctggtcgcccactccgacggcgacgtgctgctgcacgccttgtccgatgcgctgctcggcgcggcggcgctgggcgacatcggcaagcacttcccggacaccgacccgcggttcaagggcgccgacagtcgcgcgctgctgcgacatgtggtcgccatcgtcgccgagaagggctggaaggtcggcaacgtcgacgccaccatcgtcgcccaggcgccgaagatggcgccgcacatcgagaccatgcgcgggtcgatcgccgaggacctcggcgtcgcggtcgaccaggtcaacgtcaaggccaccactaccgagcggctaggtttcaccggacgcgaagagggcattgctgtacatgcggtcgctttgctgatggcccgatgagcgttctcggcgaactcgacctgctcgggccgcgcgcccatggggcagcctgcggcgaggcggtgctcaaggccgtggccgaggacttccaggtcgacgaggtgctggacattcccctcagcggtgaaggcgagcacctctggttgtgggtggaaaagcgcggattgaacaccgaggaggcggcccgtcgcctcggccgcgccgccggcgtgcagcagaagaacgtcagctacgccgggttgaaggaccgccaggccctgacccggcaatggttcagcctgcacctgccgggcaaggccgatcccgacctgggtgcagccgagggcgcggacttgcggattcttcgctgtacccgtcattcgcgcaagttgcagcgaggcgcgcatgccgccaacggcttcaccctgcgtctgaccgggctgcgggcggagcgtgcccttctcgacgcgcgcttggaacgtatcgccgcggacggcgtgcccaattatttcggcctgcaacgcttcggccacggcggcggcaacctggtcgacgcgcgcagttgcgcggaacaggacctgctgccggcgaaccgcaacctgcgttcgcgcttcctttccgccgggcgcagctacctgttcaatcgcctgctcgccgagcgggtcgcggagggtagctggaaccgggcagcggtcggcgacctgctggccttcaccgacagccgcagctttttcctcgctggcgaggaagaatgccgcgatgcccgtctggccgccctcgacctgcaccccaccggaccgctctggggcgagggcgatccgccgagcggcgccggcgtcctcgaacgcgagctggccctggccgggagcgagccggcgctctgccgctggctggcgaaggcgggcatggcgcacgaacggcgcatcctgcggctccccatccaggggctggcgtggcattatcccgaacctgatgttctgcaactggaattcgtcctgccggccggttgtttcgccaccgtagtggtgcgtgaaatcctcgacctggtaccgacagggcagacggaaaacccatgcgcatactgattgccaacgacgacggggtgaccgcacccggtatcgccgcgctttacgacgcgctggcggatcatgccgattgcgtagtgatcgcccccgaccaggacaagagcggcgccagcagttccctgacgctggaccgcccgctgcacccgcagcgcctggacaacggattcatcagcctcaacggcacgccgaccgactgcgtgcacctgggcctgaacggcttgctggaggaattgccggacatggtggtctcgggtatcaacctgggcgccaacctcggcgatgacgtcctctattccggtaccgtggcggcggccatcgaagggcgcttcctgaaggggccggccttcgccttctcgctggtctcgcggttgacggacaacctgcccaccgccatgcacttcgcccgcctgctggtctccgcccacgagcgcctggccgtgccgccgcgtaccgtgctcaacgtcaatatcccgaacctgccgctggatcgcgtacgtggtatccaactgacccgcctcgggcaccgcgcccgtgccgccgcaccggtgaaggtggtcaatccgcgcggcaaggaaggctactggatcgccgcggccggcgatgccgaggatggcgggccggggacggatttccacgcggtcatgcaaggctacgtgtcgatcactccgttgcagctggaccgtaccttccacgaagccttcggcggcctcgacgagtggctgggaggactgacgtgatgtccgaagacctgcatcgccggggtatcggcatgacctcccagcgtacccgagagcgcctgatccagcgcctgtacgaagaaggcctgtccaacgcccacgtgctcgaggtgatccgccgcacgccgcgtcatctgttcgtcgacgaggcgctctcgcatcgcgcctacgaagacaccgccctgccgatcggccacaaccagaccatttcccagccgttcatggtggcgcggatgaccgagttgctgctggcggccggcccgctggacaaggtcatggagatcggtaccgggtccggctaccagaccgcggtgctggcgcaactggtcgagcgggtcttctccgtcgagcggatccaggcgttgcaggacaaggccaaggagcgtcttgcggagctaaacctgcgtaatgttgtctttcgttggggcgatggttgggaaggctggtcggcgttggctccctacaatggaatcatcgtcaccgcggcggccacggaagtcccgcagtcgttgctggagcagttggccccggggggccgtctggtgatcccggtcggtggcggcgaggtccagcaactgatgctgatcgtccgcaccgaggacgggttcagccgccaggtactcgactcggtacgtttcgtcccgctgctcaacggcccgatcgcctgagccggcggccggcgtcgccggcccgattgaacgaaagcgaagaagatggataagggggaaggattgaggctagcagcgaccctgcggcaatggactcggctctatggtggctgccacctgttgcttggggccgtcgtctgttcccttctcgccgcctgttcgtcgtcgcctcccggcggggtcaaggtcgtcgatcgcaacggttccgcgcctgccgctgcgcggcgtacgccggtcaccagcgggcagtacatcgtgcgccgcggcgacaccctgtattccattgccttccgcttcggctgggactggaaagccctggccgcgcgcaatggcatcgcgccgccctataccatccaggtcggtcaagctatccaatttggtgggcgggcatcgacgcaaccgtccgtcgcgaaaaacacgccggtcgtcgctgcgcccgtggcgaccaagcctaccccggttccacccgcagttagtacgtcggtacctgccaagcccgcaccggctccggcctcgaccacgaccccacccagcagcggcgcgactcccgtcgtcgcggggcctgcggtgggggggtgggcatggcctgcgagcggtactctgatcggccgttttgcctcaaacggaagtttgaataaagggattgatatagccggtcaattgggccagcctgtcctggctgcgtctggtgggaccgttgtatacgccggtagtggtttgcggggctacggcgagttggtcatcatcaaacacaacgagacctacgtgagtgcctacggtcacaaccgcaggctgctggtgcgggaagggcaacaggtcaaggtagggcaatcgattgccgagatgggctccacaggaaccgatcgggtgaagctgcacttcgagattcgccgccagggtaagcctgtcgatccactgcaatatttgccacgtcgctgaccgggagttcgcccgcccacatcatgtaggtgagcgggtccgggcgtgtccagcgggaaaggaatcgcccgggcttgagtcgaactcatgcaagggataacgacatggcactcaaaaaagaagggccggagtttgaccacgatgatgaagtgctcctcctggagcccggcatcatgctggacgagtcgtctgccgacgagcagccttctccccgggcaactccaaaagccaccacttccttctcttccaaacaacacaagcacatcgactacacgcgcgcgttggacgcaacgcagctgtatctcaacgaaatcggtttctcgcccctgttgacgcccgaagaggaagtccacttcgctcgtctggcgcagaagggcgatcccgctggtcggaagcggatgatcgagagcaacctgcggttggtggtgaagatcgcccggcgctatgtcaatcgcggactgtccctgctcgacctgatcgaggaaggcaacctaggcctgatccgcgccgtggagaagttcgatccggagcgcggattccggttctcgacctacgccacctggtggatccgccagaccatcgaacgggccatcatgaaccagacccggaccattcgcttgccgatccatgtggtcaaggagctcaacgtctacctgcgtgcggcgcgggaactgacccacaagctcgaccacgaaccttcccccgaagaaatcgccaacctgctggagaagccggtcgccgaggtcaagcgcatgctcggcctgaacgaacgggtgacttcggtggacgtctctcttggtccggactcggacaagaccctgctggatacgctcaccgacgatcgccccaccgacccgtgcgagctgctgcaggatgacgatctcagcgaaagcatcgaccagtggctgacggaactcaccgacaagcagcgtgaggtggtgattcgccgcttcggcttgcgcgggcacgaaagcagcacgctggaagaggtcggccaggaaatcggcctgacccgcgagcgggttcgtcagatccaggtcgaggcgctgaagcgcctgcgggagatcctggagaagaatggcctgtcgagtgacgcgctgttccagtgacggaaaaccttagacccactgaagacccggcgttcgccgggttttttgtgtctgctcttgtaagcattaacttacacggcgtgtgagcctaagtagataaatgcccgggaggtttgccaaaaacgctcggtgaatttaagtaacttattgaaattaaaggaatatatttttctaaaatggctgccgaagaagcttcgctgggttttctggcaggttgcgggagcactgggaatcgctaatatcactcctgcgtacagggaacacgcaaccccgaaggatcggggaagggacgtcgccagggaggcgattcatcaggatgatgacgagggactgaagagtgggcggggtaataccccgccccttttttttgcctgccgttttactcgtcgccaaagaaaaggcccgctgtttgcgggccttggcgtatcagcgctccagatgctggagcttgccggcgacgccgtcccattcctcggcgtcgggcagggcatccttcttctcggtgatgttcggccagatttccgccagctcgctgttcagctcgatgaattcctgcatgttctccggcacttcgtcttcggagaaaatcgcctgggccggacattcgggctcgcacagggcgcagtcgatgcactcgtccggatggatgaccaggaagttgggtccttcgtagaagcagtctaccgggcagacttccacgcagtcggtgtatttgcacttgatgcagttgtcggtgacgacgaaggtcattttctagttctctcctcaggcgggcggctaagcgcgcgcgattctagcagcttgtgcggtagtccgtcagacccgcatcttccatgcatataacagatcgagagcttgccgcgggctgatatcgtcgggattgatcctcgacaattcatcgatcaccgggtgcggcaggctggcgaacaggtcgctctgcatcggcgaggcgggcttgccgctctgctggctcggcatctcgtgcggcaggctggtggtttccaggcgcttgaggtgttcgcgggcgcgctggattaccggggccggcacgccggccaactgggccaccgcgaggccgtagctctggctcgccggtcccggcagtacatggtgcaggaacacgatgcgttcattgtgctcggtcgcgttcaggtgcacgttggctaccgcgggctggctttccggcagtacggtcagttcgaaatagtgggtggcgaacagggtgaaggcgcgagtccgggccaggtcctcggccgctgcccaggccagcgacaggccgtcgaaggtgctggtgccgcggccgacctcatccatcagcaccaggctcttgtcggtggcgttgtgcaggatgttggcggtttcgctcatctccaccatgaaggtcgagcggccgccggcaaggtcgtcggacgagccgatgcgggtgaagatgcggtccaccagggacagctcgcagcgtgcagccggaacgaagctgccgatgtgcgcaagcagcacgattagcgcggtttgccgcatgtaggtggatttgccgcccatgttcggaccggtgatcaccagcatccgggtgtcggcatccagcgctaggtcgttggccacgaacggtgtctccagcacctgctcgaccaccggatggcggccttgctcgatgtgcaggcaggtgtgttcgacgaaccgcgggcgattcaggtcgaggttcagcgcgcgttcggcgagattcgccagcacgtccagttccgccagcgccgaggcgctgtcctggagcggagcgaggtggccgatcaggcgttccagcagctcttcgtagagcgccttctcgcgggccagggcgcggctctgggccgacagcgccttgtcctcgaaggccttcagttccggcgtgatgaagcgctcggcgcctttcagggtctgccggcggatgtagtcggccggcgcctgttcggcctgcacccgtggcagctcgatgaagtagccatggatgcggttgtagccgaccttcaggttgggcaggccggtgcgggccttctcgcgcgcttccaggtccatcaggaattgcccggcgttttcgctcagcgcctgcagctcgtccagctcggcgtcatagccggtcttgatcacgccaccgtcgcggatcaccgctggcgggttgtcgatgatcgccttggccagcagttcggcgagttcgggataggtgccgatggtggtggccagcgcctgcaggtgcggcgcttccagttcggtcatggcgttctgcaggtccggcagcgccgccagcgcgtcgcgcaggcgcgccaggtcgcgagggcgggcgttgcgcaggccgatgcgggcgaggatgcgttcgaggtcgccgatttccttgagctgcggttgcaggttctcgaagcggtagcgttccagcaggcaggcgatggactcctggcgggcttccagtaccgcgcggtcacgcaacggacggttcagccagcggctcatcaggcggctggccatggcggtctggcagcggtcgaccaccgattgcagggtgttctcgcggccaccgctgaggttgatatccagctccaggttgcggcggctggcaccgtcgaggatcaccgtgtcatcgaggcggtcgtggcgcaggctgcgcaggtgcggcagggcggtacgctgggtttccttggcgtaggcgagcaggcagccggcggcgccgatggccagggtcaggttctggcagccgaagcctttcaggtcctgggtgccgaattgctggcagaggctcttgtgcgccgagtcgcgatcgaagtcccatggcgcgcggcgacgtacgccgcggcgcttctccgccggcaggccctgtggccagtcgtcgggaatcagcagctcggccgggttgaggcgctccagttcggccagcagggtttcccagccttttatctcctggacgctgaagcggccgctggtgatgtccagcacggcgaggccgaacaggcgctcgtcgccgaggatcgccgccagcaggttgtcgcggcgttcgtcgagcagcgcctcgtcgctcaccgtgccgggggtgatgatccgcaccacctggcgctccaccggccccttgctggtggccgggtcgccgatctgctcgcagatcgccaccgactcgccgagcttgaccagcttggccaggtagccctccgcggaatggaagggaatgcctgccatcgggatcgccttgccgccggactggccgcgtgcggtcagggtgatgtcgagcagtttggcggccttcttcgcgtcctcgtagaacagctcgtagaagtcgcccatgcgatagaacatcaattggtcggggtgctgatgcttcagtttgaagtactgctgcatcatcggcgtgtgctgggagaggtcggtcatacgggccttcggaagcgggctttggacggtgcaaaagagggtaatgttaacccgattcgccggcctgtgtcgggtccgttcggaaccggcgcggaccctcaggtccgcgcctgtgcgggctgctttcagcgtgccgcggtatagctggcgccgagcttctgccgaccgtcgggcaggttgatctgcgccgggtcgagacgccagacccgcgccgcggcgatgtcgccgaggagcaggctgtaggtcgggtcgaacgaagtgctggagaagatcaggtagtcctcgttcaccggcgcggcgtcggaattgtcgccctggcagtggttgagcggcaggatcgccggggtgccgggcgggctgttgggtacgaccatggccaactggtcgttgccggccggctgggtacgcgagaggaagtaggcggtgtagtcgcgtaccaccgggtaatagtcgcggccccccgcggccggggtggcgagggcgctgacctggccgttctccaggttcctgcgcaccacccgcaggctgtcgccggctcctgtcgcgtagaccacgtacttgcctgagggtgtgaggaacggcatcgactcctcggtgctccagccgtcgccggtcacggctttccaggcgctcacgccgacgctgccatcgccattgaagaccagggtggcgaggcggatgtcgccctcgtgcttgagcacgacctggcggccgtcgaaggagaacttcggatcctcgttgcgaccgccgatggccgcggtcaggttgctcggcgcctgggtaccgccgatggcccaggcgaacacgtgccaggcgccattctggcggcccatgaaggtcaggtagcgaccgtccggggagaaatgcgcattcatcgggtcctcgatgttccagccgggcaggttgagctggcgggtgctcttgctcttgaaatcgtgcaggtagaggttcgaggagccgtccccgtactccatatagctgtggtagaccaggcgcccgccgagcgcgggcaggctgctggcgggttgcagggccaggttggcggtgcaggccgcatgggcggggaggctggctacgggggagaggagcagggcgagggagagcagagagaccttgagtggcgcgatgttcatggggtgcctttccttggacggtgatggagcacgcatgttcgcgcattcgctgccttcgcgcggttgcgcttgtccgaaagctgcttctgaatggaaaagccgatggtgtagggtagtccctttccgtttctaccctggagaacagtgatgaccctgatggagtccgacctgaccgcactggccgcccgcctcggcgaaagccttcgttacctgggcgagcaggtcagcacggcggaatcctgcaccggtggcggcatcgccgaggcgatcacccgcatcccggggagttcgggctggttcgaggctggctacgtgacctactcgaaccgccagaagaccctccagctggaggtgcccgagtcgctgttcccggcagtcggcgcggtcagccgggaagtggtcgaggccatggtgcgcggcgcccagcggcacagcggggcgcgtttcgcggtggcggtgagcggtgtcgccgggcccgacggcggctcgccggaaaagccggtaggcacggtctggctggcctgggccgacggcgagcggctggtcagtgagcgctgccagttcaacggcgaccgcgacgccgtgcgccggcagacggtggcgaccgcgctgaccggcctgctgcgcatgagcaacggcgagaacccgggctagccgcgcctgcgggcaaccgttcggaacattcttcccgtcgggggtaggcgagcgacttgccctgtggaataatactgtctacttatacagttgttcgtggccgtccggccgccctgacttcgcgaggacttcaatggacgagaacaagaagcgcgccctggccgcggccctgggacagatcgaacgccaattcggcaaaggcgcggtcatgcgcatgggcgaccatgagcgccaggcgatcccggccatctccaccggctccctgggtctggacatcgccctcggcatcggcggcctgcccaagggccggatcgtcgagatctacggtccggaatcctcgggcaagaccaccctgaccctctcggtgatcgccgaggcccagaaacagggcgccacctgtgccttcgtcgacgccgagcacgcgctcgatcccgactatgccggcaagctgggcgtcaacgtcgacgacctgctggtctcccagccggacaccggcgagcaggccctggaaatcaccgacatgctggtgcgctccaacgcggtcgacgtgatcatcgtcgactccgtggccgcgctggtacccaaggccgagatcgaaggcgagatgggcgacgcccacgtcggcctgcaggcacgcctgatgtcccaggcgctgcgcaagatcaccggcaatatcaagaacgccaactgcctggtcatcttcatcaaccagatccgcatgaagatcggcgtcatgttcggcaacccggaaaccaccaccggcggtaacgcactgaagttctacgcctcggtccgcctggacatccgtcgtaccggcgcggtgaaggaaggcgacgaggtggtgggtagcgaaacccgcgtcaaggtggtgaagaacaaggtttccccgccgttccgccaggccgagttccagatcctctacggcaagggcatctaccgtaccggcgagatcatcgatctgggcgtgcaattgggcctggtcgagaagtccggcgcctggtacagctaccagggcagcaagatcggccagggcaaggcgaacgccgccaaatacctggaagacaatccggaaatcggttcggtactggagaagaccattcgcgaccagttgctggccaagagcggcccggtgaaggccgacgccgaagaagtggctgacgccgaagccgattgaggccaatggcgatcgtgctcgatacgcccgtcgccgtgcggcgggcggccatggatctgctggcgcgccgtgagcacgggcgcgccgagctttcccgcaagttgcgccagcgtggcgcgtctgccgagttgatcgatcctgccctcgaccgcctggccgaggaaggtctgctcgacgaatcccgctatctcgaaagcttcatcgccagtcgcgcccgtagcggccatgggccgttgcgcatccgtgaggaactggcgcaacgcggtctgccgcgcgccgatatcgaaagggcgctgggtgcctgcgaggtcgactggagtgcgcaattgcgtgaggtctggcgccgcaagttcgcccgcctgccgcaggacgccagggaaaaggcccagcagggccgcttcctggcgtaccggggttactccatggagtcgatcagccgcctgttgaacggccgcagcgacgattgagcgcgtgccggagcggcagcttcagtcccagttttccggcaggttgatgtagtccagcaattcccgcagccgcccctggtcgcgcccgttgaacacgaaggcgaggcgggtcaggttgcggaactccggttcgtcctgttcctgctcgctgtaggcctgctgctggaagccgccgctcaggcagaggctggcgaagtgttcgtgcaggtgcgccagcgcggcttcgttcagggcgtggttcaggcgaatcacgaaagtgcctttcagccagcggctggagtggaaattgcggtagaactgggcgatttccttcaccgcgtcttcggccgaatgcaccaggcgcatcaggcgcatgtcggccggcaagatatagtgattctccagcaactgttcctgcatgaactccagggcgtgttcccagtagcggccgcccggctggtcgagcagcacgatcggcaccagcggactcttgccggtctgtaccagggtcagcacttccagtgcctcgtctagggtgccgaagccgccggggcagagcaccagggcgtcggcttccttgacgaagaacagcttgcgcaggaagaaaaagtggaacgacagcaggttgccgctgccgtccaccgtatggttggcgtgctgctcgaagggcagggtgatgttgaagcccaggctgttctccagcccggcgccttcgtgggcggcggccatgatgccgccgccggcgccggtgatcaccatcaggtcgtagcgggccagttcctcgcccagcttgcgcgccagggcatagaccggatgttcgaccggcgtgcgcgccgagccgaacacggtgaccttgcgtcgccgcttgaactgctcgaggacgctgaaggcatgctccatctcgcgcagggtctgcagcatgatcttggcgtcccagcggttgcggtcggcctgggccatgcgcgtcacggtgaagagcatctcgcggtagagcgcgagattggggctgtcgccgggagccgcaagggccgccagttcgtcgaccttccgcgccaggtcggtgccgctggtctggaagtgccgggaaagatagtcatcggcttcgtagggcattcgcatactccttctacaaccaccctggacaggcggtcatccgcatactgccacggactgcgtgacagttgcggacggcggctcagatctcgatgcgttcgccgggttccggtatctcggcatcccagtcgagacgctcgcggatcgcgccctgcagcgcttccatcttttcccgctcgccatgtatcaggtatagcgctggacggtgggcgaagtgaccgacccagtcgagcagctgcgattgcccggcgtgggcggagaagccgccgagggtatggatctgcgccttgaccgcgatgcgctggtggaacacgcgaaccgcgctggcgccgtcgacgatgttgcggcccagggtgccgcgcgcctggaagccggggaataccacatggcattccgggcgccagaggttgtgcttgaagtgatggacgatacggccgccggtgcacatgccgctgccggcgatgatgaccgcgccgctcttgatccggttgatcgccatcgactcgtcggcgctgcgggtgacgcgcagcaccggcagccattcctccaggcgggtggtgccggtgccgcgaatgtactcgcggtcgcggtcgtcgaactcgttgctgtggcgcaggtagatgccattggcacgggcggccatcgggctgtcgaggaataccgcctgttgcggcaggcggccctcctggtagaagcggccgaggtagtagagcaggtcctgggtgcgaccgacggcgaacgacgggatcagcacgttgccgccgtcgcgatgcgcctggtcgagaatcgccgccagttcctccagggtgtcgttgctgtcgcggtgatcgcgatcgccgtaggtggattcgagcatcaccacgtcggcccggctcagcggcgagggcgctcgcatcaacggcgagcaggtgttgccgaggtcgccggaaaacaccaggcggcgcggttgcacctggtcgtggaattgcacttcgacgatcgacgagccgaggatgtgcccggcgttgtgaaaggtcacccgcacgccacgagcgaccgccacggtgctgccgaggctgatcggccggcgcagcttgagcgcgcgttcggtgtcggcctgggtatacagcggcttgatgctcggcttgccgatccggttgcgccagcggttctcccactcggcgtccttttcctggatgtgcgcggagtccagcagcatgagttccagcagttcgcaggtggcctcggtggcgaagatcgggcccttgaaaccctcggccgccaggcgcggcagcaggccgctgtggtccaggtgggcgtgggagatgaccaccgcgtcgatgctcgcgggatcgaaggggaagggcgcgcggttgccgttgtcggcttcgcggcgcccctggcgcatgccgcattcgagcaggaccttcatgccatcgagggtttccagcagataacaggagccagtgacctcctgggcggcgcctagaaacgtcagtgatgccatcgagcctcctccgtcagagctctgtcgacaccccgatacctttcggggatcgtggaatgccatggaaccttcgtacagggccagggtgaacgaatcgggggcggggagcttgatgcaggtcagcgccctttgccgtgtgctgcctagactgcaaggcaccactagggaggctacccaccatgagtcagattctgcccagtcaggacgagttgcttgcccatgcggcggccgagccggcgtttgccgcgtggctgcaaggccatggtccgctccagcatagcgcagagacccgcgccgccgtgttccgcaccgctcatcaattggtccaagccgggctgcaaccggacctggccagcgtctaccagctgttccgcgccctcgaccggctgaccgccagcgccctgcgcatcgtcgtgcacatgacctacgcccggcgcatccgcctggacggccagccgttgcaggccgaggatttcaagacacagcccgagggccacaccggcggagccctgaacatggtcccggcctacgccggctatctggcactcaacgtcctgaccggcaagactcgcgcctggctgatgggccagggccattgcgtggccgccatcgacgcgctgaacgtcctcaccggcaacctgcacccggagcaggagcgcgcctatgccgacggcgaggaagggctgaaccgcttgctgcaggacttctacggctacgcccaggcccccaacggcgcaccggcggcgccactgggcagccacgtgaatccgcataccgccggcggtatcgccgagggcggctacctcggcttcgccgaattgcagtacgcgcacatgccgctgcccggcgagaccctggtggcgttcctctccgatggtgccgccgaggaacagcgcggcagcgactggattccgcgctggtggcgagccgaggattgcggggcggcgctgccggtgatgatcgccaatggccggcgcatcgagcagcgcaccgaactgggcacccatgaggggctggagggcttcaagctgcacctgcgccgctgcggcttcgatccgatcagcttcgatgggcgcgacccggccgccttcgtctgtacgctctgggagatggagcagcgcctggagcggcgcgtgcaggagaagaacagcggcatcctccgctacccgctgccgattccctacggcatcgccgagacggtcaagggcttcggcttctatggcgccggcagcaacgccgcgcacaacctgccgctgccgggcaatccgcataacgacgaacaggcccggcaactgttcaaccagcatgcaaacgaactctgggtcgagcctgaggctctcgaattggcccgccggctgttcgccgagcagcgtggcgagcgtcccctcgaacgggacaacccgctggccctgcgccatcccatcgaaccgatcatcccgccgctgcgctatcgcgacgacgcctgctcgccgatggccgcgctggaccgcttctataccgagctggtggaggccaaccccgacctgcgcgcccgggtcggcaatcccgacgaattggccagcaaccgcctcggcggcgtgctcaaggcgctcaagcatcgggtcagcgagccggagagcgaactggaatcggtgagcggtcgggtcatcaccgcgctcaacgaggaggcggtggtgtccgcctgcctggccaaccagggcggactcaacctggttgccagctacgaggcgttctgcgtgaagatgctcggcgcggtgcgccagaccctgatcttcgcccgccagcagaaggaagtcgggcgtccggccggctggctgggctggccgctggtcgctacttcgcatacctgggagaacggcaagaaccagcagtcgcaccaggacaccaccttctgcgaggccctgcttggcgagatgagcgacatggtccgggtgctcttcccggccgatcacaacagcgccctggcgctgctaccgacgatctaccgcagccgggggcaactggcctgcctggtgatccccaagcgcgaccggccgatggtgttcgacgccgtccaggccgagcgcctggcccgcgacggcgcgatcctggtcgaggagcgctgcggctccgatccgctgctgctgatcgccaacggcagctaccagctcgaacagatgcgccgcgccgcgcagcgcctggccgaggccgggcaggcctaccggctggtctacctgcaggagccgggacgcttccgcgcgccgcgcgatcgctgggaggtcgaggcggtggccgacgaggcgctggtggaacgactgttcccggatagccatgagcgccgcgtgctactcacccatatgcgcgcggaagtggcgcgcggtcatctttggccgatcctgccggatgcccggcgcacctcggtactcggctatcgcaaccgcggcggcaccctcgacgaggcgggcatgcagttcgccaaccgcgcctgctggggcaacgtgctggcggcttgcgcccgcttgatggaggtcccgcgcaccgcgctgctgaccccggaggaagcggcggcggtggccggcaagggcgatccggcgttgttgcgctgagttcggctgcgtatcggcggataacgtctgtggcgttattcgccctgccgaacgggggcgggtgtctggcgaaggcagggtgtgggcagggtatcggcggatagcgtcggcgacgtcattcgcctacggagcggggggacgaagcggcttgagcagcccgtccagcccgtcgatcttcagttccagggtcaactgcatcagccgcccgagttcaccaggcgggaagcctttcttgtagaaccacagcaggtactcctccggcaggtcgaccagcatccgtccctggtacttgccgaacggcatcggcgtcctggcgatcttcagcagatgctgcttgtccagcatggcgaccgcgcggcgcgcttacttcttgccctggatgcggcagctgccggcatcgaagcgttcggtggcgaccggctggttggttttgtactcggtgaagctgtaggtgaggatcgcgccgcgggcgagcaactggcgatagccggtgttgctgcacacgctatcgccgagctggctgcgcacgctgtccgggttggagcgcatgcgctcggcgtggctggcgcgtacgctgaggtgattgatcaactggttgccttcgacggtgtagccctggtcgaggatgtcttcgttgatggcgcggggagtgcctacgctgctttccttggccactttctccagcatcttgctcagttcgaaatccttgagcgaggcggcatgggcggcggtgggcaggacgaaacaaagggcaagggccatgaagcgcgacatcgaagatctcctggggcaataagcggattcgaccgatggagggggcgaattgtttccgtcggcccattcccgggacggacggtggcgaatgggcgccatgttgccgcgttcggggcggggcacggaaacgcaaaagggcgaccgagggtcgccctttcgtcgatagcggtgcggatcagcgcagcttgatctctgtccagagcttgttcagggcgcgtcgctggcgcgagttcaggtccttcagcggctccagcctggcctgggtggtggcgtccgggaacagggcggcgagcgtcttgatttccggcttgatgaagggcagggcggcggcgttgggcgtgccggtaccgatctggttggtcagctcggaagcgttccgaccgtcgagcatgaagtcgatgaagcggtaggccaggtcggggttcttcgagcccttgtggatcaccatgttgtcgatggccagtaccgcgccctggcggggcagggcgaagtcgaccttgaaggcgcggccggcagactccgcgtcggccctggcctggtacatgtcgctggagtagccatgggcgacccagatgttgcccagggtcagctccttgatatagctcgacgagttgaacgcggcccagtacggcttggccgcgaggatcagcgcctgggcttccttccagtgctgcgggtcggtgtcgttggcggagtgaccgaggtacttcagggcggcgccgaacagttcctgcgggtcgtccatcaccgtgaccctgcccttgatcttctccaggaccgccgggtcgaagattaccgaccagtcggcggggtcgatgcccagtttgtccagctcggtcttgttgtagccgaccagggtggtggtgaaggcgtagggcagggaatagcggttgcccttgtcgaaatccttgtcgaggtagcccgcggcctcgttgctcaggttcgccaggcgactcttgtccagctccagcaggtcgcccttgcggatcagcgcctcgaccgcgttctgggtcgggatgatcacgtcgtagccgctggccccggcggccagcttggccatcatttcctcggtgccggaatagaactcctgcaccagctcgcagccacattgctgctcgaagcgtttcagcgtgtcctcggcgatgtagtcgttccagttgaacagatacagcttctcggcggcggtggcctgggcggctcctgccatgagggttgcgacgagcaacagctttttcatcatggttccttgttacggggtggcagggctccggaaaccggagcagggcaaggccgcgggcctctccgggaggcacgcgggtttcggcggatcaatggcccttgatggcgctgggggagagtttcgaggcgatcacgatcagcaccagggtgagcagcatcagcagggtggagacggcgttcacttcgggcgtcacggcgatcttgatcatggtgtagatctgcgtcggcagggtggcgaagccgccgccggcggtgaagaaggtgatcacgaagtcgtcgatggacagggtgaaggccatcagcgcgccggcgacgatgcccggcatgatcagcggcagggtcaccaggcggaagctctgccagggcgtggcaccgaggtcgcgggccgcctcggtgaggctttcgtccatgcccgacatgcgcgcctgcaccaccagggcgacgaagccgaccgagaaggtgatgtgcgcgagggtcaccgagagcatgcccaggctcatgttcaggccgatgaagaagatcaccagcgagacccccatcaggagttccggaatggcgatcggggtcagcaccagcaggggcagcacgcgcagcttgaagcgatgcagggcgaccccggcgagggtgccgagcagggtcgccacgctggccgaaaccagcgcgatgaccagcgagttggcggcggcctggagcatgtcgcggttgccgaacagcttgcggtaccagtccagggtgaagcccacccactcggcgttcagccgcgagtcgttgaaggagtacagcaccacgatcaccagcggtacgtagaggaacaggtacaccagcgcggtggcgctccagagcaggtagggcctacgcatgggcgcctcccttgcgggcgcgcgcggcgcccatgccgagggcgaccagcagcaggatgcagccggtcagggcgatcgacagcgcgctgccgaacggccagtcgcgggagtcgaggaactggctcttgatcaggttgccgatcatgatgccgtcggtaccgccgaccaggtcggggatggcgaacattcccagcaccgggatgaataccagtgccgcgccggcggccacgcccggcagcgagagcgggaaggtcacccgccagaagcgttgccaacgaccggcgccgaggtcctgggcggcgtccagcagggccgggtcgtgtttctccaggttggcgtagagcggcaggatcatgaacggcaggtgcacgtagaccatgcacaggatcaccgcgaacggggtgaacatcaggctgatcggctgcgcgccgaacaggtccagcgcggcgttgatcccgcgggtcagggcaccggacggcgagaggatgatcatccaggcgtagacgcgtaccagcaggttgctccagaacggcaggatcaccagcaggatcagcaggttgcgccacttcgccggggcccgggcgagggtggtcgccaccgggtaggcgagcagcaggcaggccagggtggtgaccagggcgtagccgaaggatttgacgaacagttgcaggtacacccagctctcggtgagccgggtgtagttctccacgctgaggtcgtagacggtctgcccgtcctcgctgtacatccagggcgccaggccgccatagtcgccgggaaagcggaacgaggcgaacagcatgatcagcgccggaaccaggaagaagaacagcagatacgcttgcggcggccagaccagcagccacttgccgaggttctttctcatcgtgtcaggccctgaccagatggccggcatcgaagcgccaggcggcttccaccgcgtcgcccacctcgaagaacttggctcggccgggcgtggcgttgggcagcagggtttccaggcgctcgccgttctccagttcgacgatgtacagggtcacgtcgcccaggtagagcagttcggcgacgcgaccgcggaagtgcacctcgtcgctgtcggcggtgacgctctgcgccaggcggatcttctccggccgcagggtcagcacgcaggcctcgccgggctgggcgtcgaaggatttcagcgcctggacctcgcccaggcccctgaggtcgatgcgcacgcgttcgccgtcgaccgcctcgaccgtggcgtcgagcaggttgcactggccgatgaagtcggcgacgaaacgactgcgcgggaagctgtagatggtttccggggcgtccagctgctccacccggccctggttcatcaccgcgatgcggtgcgacagcgccagggcttcgccctgatcgtgggtgacatagacgaaggtgatgccgacgtccttctgcaggttgatcagttcgatctgcatttcttcgcgcagcttggcgtccagcgccgacagcggttcgtcgagcagcagcaggcgcggccggtttaccagcgcgcgggcgatcgccacgcgctggcgctggccgccggaaagctgtgtcggcatgcgcccgcccttgtccgccaggcgcacgtccttcagggcttgttcgacgcgggcgtcgatctcgctcttcgccactccggccatcttcagcgggaaggcgatgttctgcgccacgctcatgtgcgggaacagcgcgtagctctggaacaccgtatgcaccgggcgcttctccggctcgacgccggcgaggtcctggccgttgaggcggatctcgccgctgtccggctggtcgaagccggcgagcatgcgcaggagggtggtcttgccgcacccggaagggccgaggagggtgaagaattcgccggtgttgatcgtcaggctgacattgtcgacggcggtgaagtcgccgaagcggcgggtcacgttgcggatctcgagcaaggggggcgtcactcgtctggagaggcagtaaggtcagcgggcggagccggctgcccggtgtcgaaaaagggggcggattatagggatcgcatcccgctctaactagacgtctgaggcccctgtgaagaattttttttcgcggcctcggaagttgtccgacaaagcaggagccacgcgggctctgatagaatttcgcggtcgctttccagcccgtttcctcgagtcttcgatgttccttcgcccgtcctttccgtatcgggagcctgcccgatgagccatgccgtttcccgcttgcgccaggagcgcctggcgcgcagcctgaaacccttcgtcgcgcgcggttcgcgcatgccgcgctgcgaaggctgtcggctgctgccgagctattgcatgtgcgcctggcggccgcgggtcgaggcgcgcgccggcatgtgcctggtcatgcacgacatcgaggcgctgaaaccgaccaacaccggctggctgatcgccgataccgtggccgacaccttcgccttcggctggtcgcgcaccgaggtcgacccgcgcttgctggagttgctggccgacccgcagtggcagccatacctggtgttccccggcgaatacgtggcggcggagcgggtggtgaacgaggtcgccccgctggtggaaggcaagcgaccgctgttcatcctgctcgacgcgacctggaccgaggcgcgcaagatgttccgcaagagtccctacctggagccgttcccggtgctcagcctgctgcccgagcagctctcgcgctatcgcctgcgtcgctcgacccgtggcgagcacctgtgcaccgccgaagtggcggcgctgtgcctggagctggctggcgacgaggccgcgggcgaggcgctcggcgcctacctggaggtgttcagcgagcgctacctgggcgccaagcggcacattccgctggacgaggccagcccggcgcaccgtgccctggcgccgttccgtggctgagcgtcaggccgggcgcgcttcggcggcgagcttgcgcggccacaactgcgccaccagcatgcccgccagcatcagcgcgcaaccgaaatagccgcgcaggtgcagggtctcggcgaggaacagggcgccggcgatggcggcgaacaccgcttccagggacaggatgatcgccgcatgggaagcgatggcgtgcttctgcgccaccacctgcagggtgaagccggtgccgacgccgagcaggccgccgtatagcagggcgggaccggcctggacgatggcgtcccagtggatttcctcgaagaccagtgccagcagcaggctgaccgccgcgcaggtggcgaactgcaggaaggccaggcggatcgggtcgtagcggctggcgaacaggcctaccagcaggacgtgcgcgccccagaccaccgcgccggccagttgcagccagtcgccggaggcgacctggaagcccgggccgatgctcagcagggccatgccgagcaccgccagcgacgcccccagccaggtgcccgcgccggtgcgctggccgaacagcaggccgagcaacggcacgacgatcacgtagagcccggtgatgaagccggagttggtcacgctggtgaacagcaggccgacctgctgcaggttgatcccggtggtcagggcgacgccgaggatcacaccggcgagcaactgtccgcgattgaagggttgcgcgccgtcgcgtcgcgagcgcagcatcagcagtggcaccagcaccagggcaccgaggacgaagcgcaggccggtatagaggaacggcccgatggcgtccatccccaggcgctgggcgacgaacgacaccccccagatcatggcggtgatcagcatcaggacatcggcacgcagggcttggcttcgcatggctcgctcgacggggcggggagggtccgccactctgccagcaagccggggtgtttgaaaagacgaacgcggtgtacgaggtatccctcattcggcttgaccggtccgccctcggtcggcatcctgagcgccgcctcggctgggccgaacaaactaggacatgtcatggcttcttacgagatcctgatcgccgacgatcaccccctgtttcgcagcgctttgcaccaggccctcaccctcgggctgggccccgacgtgcgcctggtggaagccgccagcatcgccgaactggaagcgcggctgaacgagaaggccgattgggatctggtcctgctggacctcaacatgccgggggcctatggcttctccggcctggtgctgttgcgcgggcaatacccgcaggtgccggtggtgatgatctcggcacaggaggaggccgcggtggtgcagcgctcccgcgagttcggcgccagcggcttcattcccaagtccagtccgctggaaaccctgcagcaggcggtgcgcgcggtgctcgacggggacacctggtggccgccgcaggatgccgccgccgaagccctcagcgaggaggccaaggccgccagcgccgggctcgccagcctcaccccgcaacaattcagggtactcaccatggtctgcgaagggttgctgaacaagcagatcgcctacgacctgaacgtttccgaggcgacggtgaaggcccacgtcacggcgatcttccgcaagctcaacgtgcgcacccggacccaggccgcgctgctgctgcaacaaatggagacggttcccgcttctcattgagagacggcttaacgcttttttgaccagccggcggctagactgccggccttccgaatcgatgagaacccgacgtgtcgccttcccccttcaaaggccagaccggcctcaagcgtatcctcaacgccaccggctattccctcgcaggtttcctcgccgccttccgcggtgaagccgccttccgccaactggtgctgctcaacgtggtgctgatcccggtggccttcctcctcgacgtcagtcgcggcgaacgcgcgctgatgatcgcggtgtgcctgctggcgctgatcgtcgagctgctcaactcggcgatcgaggccaccgtcgaccgcgtctcgctggaacgccaccctctgtcgaagaatgccaaggacatgggcagcgccgcgcagttcgtggccctcaccgtgatcaccgtgacctgggcgaccatcctgctgggctgatctacgcggacatgaaaaagccggaggcagcgatgcctccggctttttcttgcgtgcgagggcggcggctcaggccgccgcgtcgaagctgtcggcccgcgccatgttccacatgcgctcgtagaactcgccctcgatcttgccggaaagcagttcgcccggcttgaggaagtagtgcagctgcgagaacaggcggatctcggtgtcggtgatgcgtcgcaccaggtgcttggcttcgagctgcgagggatgttccaggcccgccgcggcgagcatctcggccaggcccttgagggtgttgcgatggaagttgcgcacccgctcggccttgtccggcaccaccagcgcgcgctggcgcagcgggtcctgggtggcgacgccggtcgggcacttgttggtatggcagctctgcgactggatgcagccgatggcgaacatgaagccgcgcgccgagttggcccaatccgcgccggtggccaggacgctggcgatatcgaaggcgctgacgatcttgccgctggcgccgaccttgatcttgtcgcgcaggttgaggccgaccagggtgttgtggacgaacagcaggccttcgcgcagcggcacgccgatatggtcggtgaactccagcggcgccgcgccggtgccgccttccttgccgtcgacgacgatgaagtcggggaggatgccggtctccagcatggccttggcgatgcccatgaactcccatggatggcccaggcagaacttgaagccgaccggcttgccgccggacagttcgcgcagctgggcgatgaactgcatcagctcgatcggcgtggagaaggcgctgtggcgcgacggcgaaacgcaatcctcacccatcggcacgccacgggtggcggcgatctcgggggtgaccttgtgcttgggcaggataccgccgtgtcccggcttggcgccctggctgagcttgatctcgatcatcttcacctgcgggtcgagggcctgggcggcgaagcgctcagggtcgaacttgccatcgcgggtgcggcacccgaagtagccgctgcccagttcccagaccaggtcgccgccgttctcgcggtgatagggactgatgctgccctcgccggtgtcgtggtagaagttgcccatctgcgcgccacggttcagcgagcgaatggcgttggcgctgagggcgccgaaactcatcgccgagacgttgaacagcgaagcggagtacggcttgctgcattgtggcccgccgatgtcgacgcggaactcgcagggatcgctgagtggcgccggacgcatcgagtggctgatgaattcgtagccggcggtgtacacgtcgatcagggtgccgaagggcttctccgagctttcgttcttcgcccgcgagtagaccagcgagcgctgggcgcgggagaagggcagggcgtcgccgtcggcttccagcaggtactggcggatctccgggcggatgccttccaccagatagcggatgttgcccaggatcggatagttgcggcgcaccgcgtgtggcgtctggatcaggtcgaacaggccgagcaggctcagggccacgcccaggagggtgaacggccagagccattcggtgctgccgaggaacggcaggctgagcaaggtgaacagggcgatacaggcgaaaaacgcatagcgactgagtagcgacagattcatcatgtctccaatcttcaggcttcggttcaaaatggtagtcaccttcttcgaggcgtctacgacgggttccccccgcgctaaccaagcgctgattatgggaaacaaacggggatagaaagcaagctaataattgtgtctggatggtcgagcagccgaatggtcgccgggaactctttccggagttgcgaattattcttatcggagtaatatgtaactatataacattatgtaggaggcatccccatgaaacccggcatccatcccgaataccgtcccgtcctgttccatgacacctcggccgacgtgtacttcctgatcggctccaccgcggagaccgacaagacccatacccataccgacggcaagacctatccctacgtgacgctggacgtttccagcgcctcgcacccggtctacaccggcgaacagcgcaagaccaagagcgaaggccgcgtggccgggttcaacaagcgtttcgccggcttcgtcggcggcaagggggcctgatgaaagtcctcgcctcgctgaaacaggccaagctgcgccatcgcgattgccaggtggtgaagcgccgtggccggctctacgtgatctgcaagtcgaatccgcgcttcaagtgcgtgcagggccggccgaagccgaagatcaagcgccgctgagcggcgacgggacggtcgcccgtcccgtcagccctgggcctggaggaacaggccgaacagctcggactgcgacttgatgccgagcttgccgtacatgtgcttgcggtggaccttcacggtttccgccgagatcgccagcttgcgggcgatctccttgctcgagcagccgctgagcatcagcctgccgacctccagttcgcgcgccgtcagcggcgtgcccatctgctccgcgaccttctccagcgaaccctgccagcccggctccggcgccgcggggctgttcaacacttcgtcctcgaaggccaggcgctggcgcatcagcccggccacccagggccgcaccaggccgagcacggcgagttgctcgggggtgaagcggcgccgcgagccgagcgacaggcagagggtgcgttcgccggagagctggacgttgatctggatttcatcggccaccacgttgaggcggaagtaacgctggtagtaatcggtctgctcgaagcattccggtgccacgtcggccagacggaacaggccgctgcacgggttctcgcggctggcgatgtagaacgggtcgagcaggtagaggcctcgcaggtagtcctggaacagcgggtccggcccgccgtcggcgcccgggcattcggcgaacacctgtggccggccctggctgaacagcagggccacccagctgtcgaacggaacgtactgttcgagcaggcgtaccaggcgaatccagaagtccggcgcatccagcgcctcgaccagttgcccgacggagcggtgccaggcgatgtcctgcaaggtgaaactcatcttctacccctgttgggttaaccctcggacgtaattatcggcgcggggaacgccaagcatactgtgccgacccctgcatacgaacagcgcgcgtgccgaacagcgccgagaacaacaaggaattccgatgaaagtcgaactcgtccagatcgccggtcgcgatggcgacaccgcgcacaacctggaacgcgccctggcggccatcgccgactgtgcggcggacaccgaactggtggtgttcccggaaacccacctgaccggcttccccagcgaagacaacatcgccgccctcgccgagccgctcgacggcccgacggtcagcgcggtgcagcgcgtcgcccgtgaacgtaacgtttcggtggcgatcggcatcgccgaggcggacgccggccgctattacaacaccaccctgctgatcgctcccgacggcatcgccctgaaataccgcaagacccacctgtgggcctccgaccgcggcatcttcacgcctggcaaccgctacgccaccgccctgtggaacggcatccgggtcggcctgctggtgtgcttcgacatcgagttcccggaaagcgcgcgggccctcggccaactgggtgcggaactgatcatcgtgaccaatggcaacatggacccctatggcccgacccatcgcaccgcgatcatggcccgcgccatggaaaaccaggcctacgcggtgatggtcaaccgcgtcgggcatggcgacggcgggctggtcttcgccggcggcagcgctgtggtcgatccctacggccagttgctctgcgaggccgggcgcgaagaatgccggcagatcgtcgaactggacctcggccggttgcaggatgcgcgtcgggattaccgttacctcgaagagcgtcgcctggtcctgcccggcgagcgccgcgagcacccggacggcctgcgcgagctgctgattccctgattcaccgcggcgcgacaggagcgtcgcgtcgtcctccgtccgccagcgagcgggcgaggatcggcccggaaagccgtagcacaacgatgggcgcccgagcgtccgccggtctcccgggtgaggggaggcccctgcgccctgcggcccggccggctgcgggccactgccataacaaacgataattccggagtaagcagtaatggccagactcaagcgcaccctgtcgctgggttccgtggtgctgttcggcatcgcctacatgacccccatcatcgtcctcgggactttcggcatcctcgccgagaccacccagggacacgtccccgccgcctacatcgccgcttccctggcgatgctcttcaccgccctcagctacgggcgtatggccgcggccttccccgtggccggctcggcctatacctacgtgcgcaaggccatcgattcccggctcggcttcatcgccggctgggcggtgctgctcgactacctgttcctgccgatggcgatctggctgatcggtgccgcctacctgcactcggcctttcccgcggtacccaacgcggtctgggtgctggcgttcatcggcgtgaccacgacgatcaacatcgtcggcctgcgcctggcgaagaacgtcaatggcctgctgatgctggtgcagttcctggtcctcggcgccttcgtcgcactctgcgtgcactacgtgctgggcgacccgggcaagccgttatggtcactgcaaccgttgctcggtggcgacctgcaggtgccgctggtgatgagcggtgcggcgatcgcctgctactcgttcctcggtttcgacgcggtcagtaccctgaccgaggaaacccgcgacccgcggcgcaacatcccgcgggcgatcctgctgatcaccctgctgggcgggttgatcttcatcgtcacctcgtacttcgtgcaactggcgcacccgtcgttcgccttcgacagcgcggactcggcggcctacgagatcgcccgcaacatcggtggcgacctgttcgtgaccttcttcctggtcggcctgatcgtcggccagttcacctccggcctctcggcccaggccagcgcctcgcgcctgctcttcgccatgggccgcgacggcgtccttccgcggccgttcttcgggcgtctcggcaagcgcttcgagacgccggtgaacagcatcgtcctgtgcggcgtggtggccctgctggcgctgcagatggacgtgaccacctccacctcgttcatcaacttcggcgccttcctcgccttcagcctggtcaacctgtcggtggtcttccactactaccttggcgccgagcgccgcggcccacgggaaaccctgttgttcctggtattccctggcatcggcctggtcgccgacctgtggctgatggccagcctcgaccatctggcgatcatcctcggcctctgctggctggcgctgggcgcggtgtacctggcggcgatcacccacggtttccgcgagcagccgccggagatgcgtttcgaggagggctgagaaagaatcgacgcccgtttcgcggcggcaaggcgcaggctcctggcctagagtggctatccatcgcctccctggttccggagccggccatgtccgacgcagcgttgttccttccccttcccgatgacgacaccttgtatgccgcgctgttggcgcgcgaccccgcctacgatggcttcgccttcgtcggggtgaagagcaccggggtgttctgccgcctgacctgcccggcgcgcaagccgaagcgcgagaacaccctgttcttcgattcgatcaagggctgcgtcgaggccggcttccgaccctgcctgcgttgccggccgctggagcggctcggcacgcaggggccgctggtcagcgacctgctccagcgcctcggtcggcaaccgcagcggcgctggttcgaagacgacctggcggcgctgggctatgacccgtccaccgtgcgccgtgccttcaagcgcgagttcggcgtgacctttctggaaatggctcgcctgcgccgtcttggccaggtcgccgagcggctgtcctcgggcgcgcgggtgatcgacgcgcaactggatgccagcttcgactctgacagcggcttccgtagcgccttcgcgcgcctgctgggcgagccgccgtcgcagttgcgcgggcgcgagctgctcaaggcggactggctgcagaccccgctcggcgccatgctcgcggttgccgatgcgcaggctctgcacctgctggagttcttcgaccgcccggcgttgagcggggagctgaaacgcctgcagaagagcagcggatcgagcatcggtttcggccgtttcgcctccatcgacaggatcgaggcggaactcgccgactacttcggcggtactccagtgcgcttccagacccccttggcgctgaacgcctcggccttcacccgcacggtctggcaggcgctgcgcgaggtaccgtgcggcagcacgcagagctacgccgggctggccaggtccatcggctcgccgtcgtcggtgcgcgctgtggcccgcgccaacggagccaaccagatcgccattgtgattccctgccaccgcgtcatcggttcggacggttccctgaccggctatggcggtggcctgtggcgcaagcgctggttgctggagcacgagcggcgcatgggcgctgccggctagccgggatcgccgcccagaagccgggcgggggcgcgcaacaccggttcccgctcgaccgctgcgggccgctgcaagtcctcggcgtcggcgcgctcggcggtcgacaggtcgctggcgtggaatccggtgatccgcaacagggccagggtacaggccagcgagaccagcgcgtagcaggccgaggccagggccacgccgacgatgctgccggtactgttgagaatccactgggccagtaccggtgtaccgccgccgaccagcagcgagcagagctggtaggccagcgacaggccggtgtagcgcacccgcgccgggaaggctcgggcgaggataccgcccaccgcgccgtagaacatcgcgtgcggcaccgtggccaggcacatgccgaccgcggcgatccagtagaccttggtttccacggcgaagaacatcgccggcatcaggatgaactccggcagcaccatcaggcatgccgccttgcgcatgtcgatgcgcgaagtgagcagcgcccccagcggctggctgaggaactgcaccaccagcgcgaccacgatgatgctgaggaaggtgccctggctgtagccgagggtcttggtcgcccaggagagggcgaaggtgctcttgaagtaggtgacgtggatgatcggcagcacgccggcgccgagcaggacgatcttccagtgcttgcccagcacctcggcgagcggcagcttcaccgtgcgcttctgcgccagcacgcgcttcatgtcttccgactcctccagcttcaggcggatcaccatgccgacgatgaccagcaccgcagagagcaggaacggcgcgcgccagccccagagaatgaagtccgaggcgggcagggcgctgagggcgaagaacgccagggtcgccagcaggttgccggtgggcgagccctgctgggcgaaggcggcgtacaggatgcccttgcccttgggcgcgctttcgctggcgatcaggatcgcgccgccccactcgccgccgaccgcgatgccctggacgatacgcagcgccaccagggagatcggcgcccagatgccgatctgcgtatagaccggcaacaggccgatgcaggtcgtggcgatgcccatcatgatcagggtgatcaccagggtggtcttgcggccgatgcggtcgccgagatggccgaagatgatcccgcccagcgggcgagcgatgaagcccgaccagagggtgacgaaggacagcagggtggccaggcccggatccatgtcggcggggaagaataccttgccgaacaccagggcggcggccaggccgtagatgtagaagtcgtaccactcgatggtggtgccgatgaaggaggcgataccggccctgcgggccttcttgtgcaggtcggcgtcttcgggagagggcgtgcgcggcatgggtcgagtcctgtttattgttgttctcgccgacacgccgctccctaccgcccttcgctgaaaggcggggcggaaacgctggtttccgtggagggagagcgtgcgtcggtgttgacccgggtgcctcggagtctaggtggcacccccgcaaatcaatagtcttttaatcttatggctcgataagggattccatatcgacgttttccgtcagccctcgctcaggcgtcgtccaggccgctcttcagcgtcgccaggaacgcctgcgccgcccgggaaggttcgctggccggaaggatcgcgtggatctccgaacgcgcgccggccggctcgatctccaggtagcgcacctcgttccgccaggccaggcagagggtctccgggatcagcgcgacgcccatgccgagaccgaccatggcggcgacggtctgccacaggcgcgcctcgtggcggatgcgcgggctgaagccggcgttcacgcagcgggcgatgatcaggtcgtggtagtgcggggagacatggcgcgggaagaggatgaagtcttcgtcgcgcagttcggcgaggtccagacgcgcctggccagccaggcggtgcccggcgggcaggcagcagaggaacgggtcgctgatcaagggttcggagacgatttccgccggcagcctgccccagtgcacgaagcccaggtcgatctgcccgcgctgcaacgcctgggcctgctccgcgctgttcatttcgccgagcaccacctccatgttcgggtgctcccgttcgaagcgggacatggccctgggcaggccgcggtagagcatggagttgacgaagccgacgcgcagttggccgacgtcgccctcggcggatagctgggtcaggcgtttcaccttctctgcctgcagcagcaggttgcgcgcttccaccagcaggacctggccggcgccggtgagcttcaccgacttgttgttgcgcagcagcaattgggttccgagctgttcctccagcttcttgatgtcgaagctcagcgccggctgggagatgaacaggcgagccgcggcgcgaccgaaatgcagttcctcggcgaccgcgatgaagtagcgaagctgtctgagatccatggcaggcacctggttctacgatctgtttttcttatcgtcgatgattttttttgtattggatgcttatcgaagcactcgcctagtctcggcgcaagacaagcaggagccgcgccatgaccgccatgcccgaagtacttcgcgaagatacgctgaacatccccgacagccgtgggctgaatctctacacctgcgatccggccctggagcggctgctggaggtatacctgccgccggcgttgctcgccgaatggcggccgctcctcgaacggctcggcgcccgtgccggcggcgagctggacgtgctggcgctggcggcggacaagaatccgccggtgctggcgccgcgcacccgccgcggcgaggatttgcagagcattcgcaagcatccggactacgtcgccctcgaacaggtggcctatgccgaacttggcctggcttccatgagccatcgcccggacggcccgccgccgctggtgaagtatgcgctcacccacctgttcgtacaggccgagttcggcctttgctgcccggtcagcatgaccgactcgctgacccgcaccctgcgcaggttcggcgcgccagaactggtcgagcgctacctgccgtccctcgcctcgcgggatttcgacgagctgttccagggcgccatgttcatgaccgagcaggccgccggctccgatgtggcgcggacccgtaccgtggcgcgggagcagggcggcgagtggaagctctacggcgacaagtggttctgctccaacccggacgccgacctggcgatggtcctggcccgccccgaaggcgcgccggaaggaatgaagggcgtgaccctgttcctgttgccgaaggtccgcgaggacggcacgcgcaacgcctatcgcatcgtccgcctgaaggacaagctgggcagccgctccatggccagcggcgaagtccgcctggaaggtgccagcgcctacctgatcggcgagatcggccgcggcttccagcagatggccgacatggtcaacatgtcgcgcctgtccaacggcgtgcgcgccgccgggctgatgcgccgggcgctgagcgaggcgctgttcgtcgcccgccatcggcgcgccttcggcaagcacctgatcgacatgccgctgatgcagaagcagttgctgaagatgatgctgcccaccgaacaggcgcgctcgatgttcatgcagatcgccacgctgctgccgcgcgccgatggcggcgaggtcgaggcgcagaaatgcgtgcggatcctcaccccgctgatcaagttccgcgcctgccgcgatgcgcgacgggtcaccggcgacgccatggaggtgcgcggcggggtcggctacatcgaggagtggagcgacccgcggctggtgcgcgacgcccacctggggtcgatctgggagggcaccagcaacatcgtggcgctggacgtcgcccgtgcggtgagccgcgaacaggcgctcgaacccttgcagcgccacctgcgccggctgctggatgacagcgacctgccaggggacgcccgcgacctcttcgacgaactgctggtgcgagtggtcgcgaccatggccgacgtcgccgagcgccgccaggatgaacaggtgcgccaggccggcagcgccctctaccacctgtgcacggcgatcttcatggcctgggaagccagccgtcaggcacccgaccagcgccgcctggccctggccttcctggtcgcccggcacaagctgctgccgcgcgacccgctgcacctggagggctggaccgaccaggccgaactgctggccagggtggtcggcgaggtgccgctgagccaggccgaagccatgcaattgctgccggcctgactgcccgcattcccgctcacaacaaccagagagtcgccatgaccaatcagacgggcgccctgcgtggcctgaaaatcatcgatctcagccgggtcctcggcggaccctactgctcccaggcgctggccgaccacggcgccgaggtgatcaagctggaacccctcggcggcgacgagacccgtggctgggggccgcccttcgagggcgacacggcgtcctacttcaagggcgtgaaccgcaacaagaagggcatcgccgtcgacctggcgacggcggagggcatcgagctgctgctgcgcttgctggaggacgccgacgtactgctggagaacttcaagcccggcaccctggcgcgctgggggatcggctacgaggaggtgcttcgccagcgcttcccgcggctggtccactgcgcggtatcgggcttcggcgccgacggcccgctcggcggcctgcccggctacgacgcggcgatccaggcgatggccggactgatgagcgtgaacggcgaggccggcggcgaggcgttgcgcatcggcctgccgatcgtcgacatggtcaccgggctgaacgccatggccggcatcctcctcgccctccacgagcgccaggtcagcgggcgcgggcagtcggtggacatcaccctgtacgactgcggtatctccctgctgcacccgcacctgccgaactacttcgcttccggacgtacgccccggcgtagcggcaacgcccacccgaacatcgcgccctacgacagctaccgcaccggtaccgagccgatcttcctcgccgtcggcaacgaccgccagttcgcccgcctgtgcgagtacctgggagcggatgaactgccgggggacccgcgcttcgccgacaacggcaagcgctcggtcaaccgcgaggcgctgaagcgcgctctggaggactacctggcggcccacgacggccgtgagctggccgagcggctgatccgtctcggcgtgccctgcggagccatcgccacggtggagcgggtggtggaacacccgcacacccgccatcgcgggatggtcgtcgaactcgagggctatcgcggcatcgcctcgccggtgaagctttcgcgcaccccggccagctaccgcgccgcgccgccggtgctgggcggagacacccgggaagtcctggcggaactgggattgagcgccgaggcgatcgacgcgctggtccggcgcggcatcgtccgcgcctgaaacccctcacggcacggcctgcgccgtgcaactcaatccccgggcaattggagatggccatggattcctcccctggggcggtgcgccccgaactcgtgctgctggagcggccggagcagggcgtggccctgttgcgactgaaccgcccggcagtgctcaacgccctgaacatgcgcctgcgcgaggctctggcggagcacgtacggcgcctcgacgagtgcgccgatacccgggtcatcgtcctcaccggaaatggcacggcgttcgccgccggcgccgatctcaacgaactggcggaggcgtccgtgctggagatccagcagcgcggggtggagcgccactggcaggccctcgccgcctgccgcaaaccgctgatcgccgccgtggagggccatgccctgggcggaggctgcgagttggcgatgcactgcgacctgatcgtcgccggtgcctcggcgcgcttcgcccagccggaagttcgtgtcggcgtgatgcccggcgccggcggcacccagcgcctggtgcgagcggtgggcaagttccaggcgctgcgcatgctgtttaccggttgcacggtacgggcgccggaggccctggccatagggttggtcagcgaggtggcggcggatggccaggcattggatcgcgccctcgaactggctcgccagatcgccggcctgccgccgctggcgctggcgcagatcaaggaagtggtcctggccggcgccgacctgccgctggaccaggccctggcgctggagcgcaaggccttccagttgctgttcgatagccacgaccagaaggagggcatgcgtgccttcctggaaaaacgcacagcggagtacctgggaaaatgagcgaaccaccgatcgttctcatcggtatcgtcggtaccggtgccatgggccagggcatcgcccagctcgctgcctgtgccgggctgtcggtgctgctctacgacagccgccagggtgcggcactgcaagcacgcgagcagatcgccacggtccttgcccggcaggtggagcggggccggctggaggcggaggctgtcgagcgcgcgatgggcaatctgcgggtggtcgaggacttgcgggtcctacgcggctgccagttggtgatcgaggcgatcgtcgagaacctggaggccaagcaggcgttgttccgccaattggaagaggtggtcggcgacgaagcgatcctcgccagcaatacctcctcgctgtcggttaccgcgatcgcctcggcctgtcgcgatcccggccgggtcgccggtctgcacttcttcaatccggtgccgctgatgcgtctggtggaggtgatcgagggtctcgccacccgcaccggcatcgccgagcgactgtgcgccctggtggcgaccttcggccaccaggcggtgcgtgccacggacagccccggcttcatcgtcaaccatgccggacgggccttcggcaccgaggcgctgcgtatcctcggcgagggcgtggcgccggtggcggcgatcgacgaagtcctgcgcgagggcgccggcttccgcatgggcccgttcgagctgttcgacctggtcgggttggacgtcagcctgccggtgatggagtcgatctaccggcagtactacgaggagccgcgttatcgtccgcatcccttgctgcgccagatgctcgccgccggccgcctggggcgcaagagcggccaaggcttctaccgctacgacggcgctgggcaggtgcccgtcgccgccccggcggttgcgccaggcgcggcgttgccgccggtgtggctgggcgtcgacgacgaacatgaccgcgcgccattgctgatgttgctacaacgtctgggcgccgaggtggagagcggcgagcgtccttccggggcggcgttgtgcctgcttgcgccactgggcgccgacgtcagcgccgcagcgcggcggttcgccgtcgatccgacgcgcagcctggccatcgacgtgctgtcggacctggagcgacaccgctgcctgatggcctgcccggcgacccgagcggagctgcagcaggcggctcgcaccctgttcgcacgggacggcgtgggcgtcacgctgattcgcgacagcgccgggttcatcgtccagcgcaccctcgcctcgatcgtcaatctcgcctgcgacatcgcccagcagggtatcgcttcggtggagcacatcgacctggcggtgcgcctcggtctcggctatccgctggggccgctggagtggggcgaccgactgggcgccgggcgcgtgctgcgcatcctcgaacgcctgcatgcgctcagcggcgacccgcgctatcgccccagtccctggctgcgccggcgcgcccaactgggcctttccctgcgccagccggacagcccgttggcctcctgatcccttggcggagaaacacaccatgctcgatgcctatatctacgccggcctgcgtacgcctttcggccggcatgccggtgcactctcgacggtgcgtccggacgacctggccggcctgctgctggcgcgtctcgcggaaacctccgggttcgccgtcgacgacctggaggatgtgatcctcggttgcaccaaccaggccggcgaagacagccgcaacctggcgcgcaacgcgctgctcgcagccggcctgccggcgcggctgcccggacagacggtcaaccgcttgtgtgccagcggactgtcggcggtgatcgacgcggcgcgcgcgatcagttgcggcgagggtcggctgtacctggccggcggcgccgaaagcatgtcccgggcgccgttcgtcatgggcaaggcggagagcgccttcagccgcacgctggaggtcttcgacagcaccatcggcgcgcgcttcgccaaccccaggctggtcgagcgctatggcaacgacagcatgccggagaccggcgacaacgtggcccgcgccttcggcatcgcccgcgaagacgccgaccgtttcgccgcttcttcccaggcgcgctaccaggctgcgctggaggagggctttttcctcggcgagatccttccggtggaggtgcgtgccggacgcaagggcgagacgcggctggtggagcgcgacgagcatccgcggccgcaggccgacctggcggccctggcgcgcttgccggcgttgttcgccggcggggtagtgaccgccggcaatgcctcggggatcaacgacggggcggcggtagtgctgctgggcgaccgcgcgatcggcgagcgcgagggcatccggccgttggcgcggatcctcgccagcgccagcgtcggcgtcgagccccggttgatgggcatcggcccgcagcaggcgatcctccgcgcgctgcaacgcgccggcatcgacctggacgaggtcggcctgatcgagatcaacgaagccttcgcgccgcaggtcctggcctgcctgaagttgctcggcctggactacgaggacccgcgggtcaatccccatggcggcgccattgccctcggccatccgctcggcgcctccggtgcgcgcctggtgctcaccgccgcccgcgggctgcaacgcatcgagcggcgctacgcggtggtcagcctgtgcgtcgggctcggccagggcgtggcgatggtgatcgagcgctgccgatgagacaccgttccccctagaaaaagaggcgcccaggcgcccgttcggagtgcgtatgaacaacaacaagaaatgcgcgtttttcctgctgccgatccttgccggcgatagcgttcccgccttggccgagggcttcctcgaagactcgcgggccagcctggccttgcgcaacttctacatgaaccgcgacttccgcgatggcgcgggacgtgcgaaaagcgaggagtgggcccagggctttctcttcgactaccgctcgggctataccgagggcaccctcggcgtgggtctcgacctgctgggcaagctcggcgtccggctcgattccggcgcggggcgtagcggcaccggcctgcttccgcttcgcgacgatggcagcgcggcgggcgactacgcgcggctggacgcgaccgccaagctgcgcctgtcgcgcagcgaactgaaggtcggcggcctggtaccgaagctaccgaccatccagcccaactacgggcggctattcccccaggtgttccagggcgcgctgctgacttccggtgaactgagcggactgagcctgaacctgggacggctgaccgaggtcagccagcgcaacgaggcgggcaccagcgacctggcgctgttcaaccgcaaccggcgtttcgccggcgcggcgcaggcggaccgtttcgacctggccggcctggactaccgtatcgccccggactggaccggcagctaccactatggcgaactggagcaggtctacgcccagcatttcctcggtctcaaggggcgcatcggcatcgctgcggacagcctggagagcgacttgcgcctggcgctcagccgggataccggcggcgctcgcggcgggcgcatcgacaaccgttccttcagcgggtcgctcacctaccgcctgcgcaacggccaggccttcggcctgggctaccagcggatgagcggcgaccacggtttcccctacctggaggggaccgatccgtacctggtcaatttcggccagtacaacgacttcgccgaggctggcgaatcctcctggcaactgcgctacgactgcgacttcgcgccgctcggggtgcccggcctgagcctgatgacgcgctatttcagcggccacggcgcgaaaccgaagggcgtcgacggcagtcgcgagtgggaacgcgacagcgacctgcgctacgtgttgcagggcggtgcgctgaagggactggggctggtctggcgcaacgctacctaccgttcggccttcagccgcgacatcgacgagaaccgcctgtacctgacctatgagctgccgctgttctgagccgctcagcccttggcggcgctgaccccttcgagggtggcgaaggaggtgtccttggcggtgagcaggaagtcgcgcatgaatggcgcatcgaacatgtccgtgcggatggcggcgaagagcgtgcagtacaggcccttttcaccgaggcgccgggccgtcacgtagccgcgcgagctgtactcgtgcagggcccagttcggcaggcagcagacgccgcgaccggaggccaccagctgcatcatcatcacggtcagctcggctatgcgcacctgcgccggctccacgtcggcggggtcgaggaagcgggtgaagacgtcgagacggtcgcgttccaccggataggtgatcagggtttcccgctccaggtcctccgggacgacgtacggtcgaccagccagggcatgctggttggccaccgccagcagcgcttcgtaggtgaacagtggcacgtaggtgatgccgggcaactcgaccgggtcggcggtcaccaccaggtcgaggtcgccgcgggccagggccggcagcggcgcgaaggagaagcccgaggccaggtccagttcgacttccggccaggcgtcgcggaactggtcgatggtcggcatcagccactggaagcaactgtggcattcgatggccatgtgcaggcgcccggcggtaccgccggcgagccgtgccaggtcgcgctcggcggtgcgcagttggggcagcagcgagtcggccagttgcagcaggcgcagcccggcgctggtgaagcgtaccggcttggtcttgcgcacgaacaactgcatgcccaggcgctcttccagttccttgaactggtgcgacagcgccgactgggtaaggtgcaggcgctcggcggcttccaccaggctgtcggcttcgcgcagcgcgtgcagggtcttgaggtggcgaagttcgagcatggcggcctctgtatgagcaaaacttgatagcggtgcggattcgttgagtttgtctcatacgccaggggctgtcgacaagcgatggcctcgatcccgcagagcgtgcgatcgtggagcgacggggagaagagcccggcacacgggacggcggcacggagcagcggcgcaacgccgcagagccacaacgccacgaccgcctggcggcattcatcaaactgtcacgctactgtggcagcgcgctggacgaaatttaatcagaatcgcgctccactggggttttgcgttctgggttttcttcatgcgtgctttcatcttcctggccgccttgttgtgcagcctctcctcctttgcggcggcgcgttgcgacgcacgcgtacctaccgagacggtcgaactgggcgacgtgcgcctggcctaccagagcatcggccgcgacagcgatccggccctgctgctggtgatgggcctgggcgggcaactgatccactggccggacgaggtggtcagcgccctgtgcgagcaaggcttccgggtgatccgctacgacaaccgcgacgtcggcctgtcggcctggaacgtgccggtgcccagttcgcggctgacctacgaagtggtgcgttatcgcctcggcctgccggtcagcgcgccctataccctcaccgacatggccggcgatgccctgcatctgctcgacgcgctggatatcccccaggcccatgtgctcggcgccagcatgggcgggatgatcgcccagcacatcgccgacatggcgccgcagcgcctgctcagcctgaccctggtgatgaccagctccggcgccgaaggcctgccggcacccagcgagtcgctgctgcgcctgctggcgcggcgcgaggcggccagccgcgagcaggcggtcgagcagcaggccgacctgctggcggcgctgggcagcccggaagtgcgcgacgatcgccagcaacttctgttgcaggccgcacgttcctacgaccgcgcgttcaacccggaaggcgtgcagcggcaattgctggcgatcctcgccgaacccagccgggtgccgctgctgaaccgtctgcaggtgccgaccctggtgatccatggcaccgccgatccgctgctgccggtgatgcacggcgtgcacgtggcggcgcatatccgtggctcggagctgaagctgatccccggtctcgcccatcgcttccaggaagccttcaaggagccgttgctggcggcggtggtgccttacctgaaggcccatcggcaggccagcgtcgtccagctctgaagccgcgctcgcggtctcaggcgtgcaggcgtacccagaggcccaccagcacgcttgccgccaccagccaggccagcgccgccagggccagcgaggtttccaggcggaagcgctcgaccagcaggtagagcgcggcgagatagacgaagtaggggatgatcgaccacatgccgaagacgatggtggtcttcaggtcgtccagcgaacggcccttgccgacgatgtagtgggcaatcagggcgaaggtgggaaacagcggcaccaggccggcgatgtagtagttgcgggtcttcgacaggacggcgaggagcacgaccacggcggcgccgatcagcgccttgaacatcaggtccacgggattctcgactgcggcggcgccaccggcttggtggcgtcgcgcattatgcccggatcgtcccgtacccttccataacgaacgaggcccgcaaaagcgggcctcgacgtttctggctggcgatcaggccgcatgcacccgcgggcgatgcggatgctcgctctgcaggtactggccgaggcgcacctgctggctcggcgagaggaacaggccgagcttgctgcggcgccagaggatgtcctcggcgtcctgggcccactcgtgcttgcacaggtagtccacttcgcgggcatacaggccgccgcccaggtgctcgccgagatcggcttcgccattgaccccgtccagcaggcgccacacccgggtgccgtaggtgcgcgcccagcgcagcgccagttcgcggtcgagccaggcgtagcggttggccagttgctcggtgagcgcctcgacgctctgcatctgctcgccgcccggcagcggtgccttggcggtccaggccgggccgagattggcgaagaacggctggagctgcgtcagcgccgattcggccagcttgcggtaggtggtcagcttgccgccgaacaccgagagcagcggcggctcgccgttgccggcggagagcgacagggtgtagtcgcgggtaatcgccgaaggctcgtcggactcgtcgtcgcacagtggacgcacgccggcgaagctgtgcaggatgtcggcggccgcgagttgctgcttgaaatgggcgttcaccacttgcagcaggtaggcggtttcctcttcgctgatcgccaccttggccgggtcgccctggtactcgcgatcggtggtgccgatcatggtgaaacggtccagataggggatggcgaagacgatgcggcggtcttcgttctgcaggatgtaggcgtgctcgccttcgtacagcttcggcacgatgatgtggctgccctggatcaggcggataccgtagggcgacttctgtttcaggtcgtcctggatgaagcgcgccacccaggggccggcggcgttcaccagggcgcgggcgcggatcgaatacaggctgccgtcgctgcgctccaggtgcaggtgccagagtcccttgctgcgacgggcgctgacgcagcgggtgcgggtatggacgtgggcgccgtgctcgcgggcggagatcgcgttgagcaccaccaggcgcgcatcgtccaccgcgcagtcggagtactcgaagccacggcggatctcggccttcagcgggctgctgccggtgaagcgcaggccgcgcgaggcgggcagcttctcgcgcttgccgaggtgatcgtagaggaacaggccggcgcggatcatccaggccgggcgcaggtgcggacggtgcggcaggacgaagcgcagcggcttgacgatgtgcggcgccttggccagcaggacctcgcgctcggccagggcttcgcggaccaggcggaattcgtagtgttcgaggtagcgcaggccgccgtggatcagcttgctgctggccgaggaggtgtgctgggccaggtcgtgctgttcgcaaaggaacacggacaggccgcgcccggctgcgtcggcggcgatccctacaccgttgatgccaccgccgaccacggcgacatcgtagacttcggcgagtggagcggagggggtgtgcgcttgactcatgtgaaaggccctgaagtcgaaagtgaacgtagttttgttcgaattcgaaaatagcttagtcgattgcgcagttattgaccagcccgatgcatcaggctttttcaatttcgaagggttgcccgggcgctaccggtttgcccgtccgcgcgggaacagcccctcttccgcatgcgggaaagcggccgccgagggtcgtggcgcatgggcagggggcggcaggtggcttttctgaaacgaacattcacggcgccgaacggcgccgtggcaggggaaatgcctcagaccaggtccaggtgaaccttgtgctgtgccatcaggcgggcgatggcggcgggcggcgggctgtcgctgatgacccggttgaccagcgagatcggtcccaggcggaccaccgcgttgcgcccgaacttgctcgagtcggcggccaggaacacttgccgcgcgttgtcgatgatcgcctgggatacgcgcacttcctggtagtcgaagtcgagcaggctgccatcctcgtcgatgccgctgatgccgaccagggcgaagtcgacgcggaactgctggatgaaatccaccgcggcctggccgacgatgccgccgtcgctgcgtacggtgccgccggcgaccagcacttcgaagtcttccttggcgctgagggtggcggccacgtgcaggttgttggtgatgatcttcaggttgcggtggttgagcagggcgcgggcgatggcctcggtggtggtgccgatgttgatgaacagcgaggcgttgtccggcaccaggctggccacggcttcggcgatgcgctgcttctcgtcgcgcatctggtcggcgcgcatggtgtaggcggtgttctcgatgctcgaatcgtaggccgcaccgccgtggtagcggcgcagcagtccctgttcggcgagctggttgatgtcgcggcggatggtctgcggggtgaccgcgaacatctgcgccatctcctcgatgctcaggtaaccgcgctcgcggacctcctcgatgatgctttgctgtcgggggggcaggttcatgggttgttctcgtgctgccgggccgggaccctggaaagtcgccaagaatgccgcacgcggggggccgttgtcagccgtgcatgagtcgtagagggcgccgcggcggcacccggccgccgcgcgcaaacgttacccagggcatgccagagcggcgcccgggaacacgccattcgccgcattgcggcggacgaatggcgccagctcgtcacagttcgccgtcgtcccagccgcgagtgcgctccaccgctttcttccagccggcatagagcttttcgcgccggggctcgtcgcactccggctcgaacacccgctcgatcaccgccttgctcttcagctcgtcgaggctgctccagaagccgcaagccaggccggccaggtaggcggcgccgagggcggtggtctcgcgcatcaccggacgttccacgcgggtgccgagtatgtcggcctggaactgcatgaggaagttgttggccaccgccccgccgtcgacgcgcagggcgcgcaggcgttcgccggcatcgcgctgcatggcgtcgagcacgtcgcgggtctggtaggcgatggattccagggtagcgcggatcaggtggtcggccttgactccacgggtcaggccgaacaccgcgccgcgcgcataggggtcccaatagggcgcgccgagtccggtgaaggccggtaccaggtagacgccgttgctgtccttgaccttggtggcgaagtattcggaatcgaaggagtcgttgatcaccttcagttcgtcgcgcaaccactgcaccgtggagccgccgttgaacaccgcgccctccagggcgtagccgacctcgccgcgcggaccgcaggcgatggtggtgagcaggccatgggtggacttcaccgccttgtcgccggtgtgcatcagcaggaagcagccggtgccgtaggtgttcttcgcctggcccggttccacgcacatctggccgaacagggcggcctgctggtcgccggcgatcccggcgatcggcagctcgccgccgccgaccccgccgatccgggcgttgccgtagacctccgaagagttgcgcacctcgggcagcatcgagcggggaatgtcgagcacctcgagcatccgtgcgtcccagtcgaggctgtggatattgaacagcatggtccgcgaggcattggtgtagtcggtgacgtggaccttgccttcggtgagcttccagatcagccaggtgtcgatggtgccgaacaacaggtcgccgttgcgcgcgcgttcgcgggcgccttcgacgttgtcgaggatccacttcagcttggtcccggagaagtacggatcggtgaccagcccggtggtttcgcggatgtagtcttccagcccgtcgcgcttgagctgcgcgcagatcgccgcgctgcgccggcactgccagacgatggcgttgtggatcggccgaccgctgtgacggtcccagaccaccgtggtctcgcgctggttggtgataccgatggcggccacctggtcgtgctcgatgctggcctgggcgagggcctcgaccagggtcgaactctgcgtggcccagatttccatcgggtcgtgctcgacccagccggcctgcggatagaactgggcgaactcgcgctgggcctggctgaccacgttggcatcgcggtcgaagacgatggcgcgggaactggtggtgccctggtccagggcgacgacgtatttcttgttgtgcttgtcggtcatggctgtggccttgtggctatggcaggaaagagcgggcggtcaggaagcgcgaaccttctccggctcggcttcggcgggcgccgcggcgctcggcagatggcgcgcgatcagtacacgatagccgccggcgccgaggcaggcaccgaggatcggggcgaagatcggcaccaggaaatagggaatctcgcggccgccggtgaaggcgatgggcccccagccggccaggtaggtcatcagcttgggaccgaagtcgcgcgccgggttcatcgcgaaaccggtcagcgggcccatggcgctaccgatcacggcgatcagcaggccgatcagcagcggcgccaacggaccgcgcggcaggccgttgccgtcgtcggtaagggccatgatcaccgccatgaggatggccgtgatcaccacttcgacgaggaacgcctggccgaccgacagcgccgggtgcggataggtggagaacaccgaggccagggccaggctgtcctggctgccgcggacgatgttctgcgcctgttcgaactcgatgaacaggctgctgtagagggtgtagaccagcgctgcggcgcagaacgcaccggccacctgggcggtgatgtagaacggcagcttgcgcccctcgaagccggcgaacagccacagcgcgatgctcaccgccgggttcaggtgggcgccggagacgccggcgctgaggtagatcgccatgctcacgccgaccccccagatgatgctgatctcccacaggccgaagctggcgccggcgaccttcagggccgcgacgcaaccggtgccgaagaagatgaggagggcggtgccgaggaactcggccaggcattggccgaacagggacggggtcggggcggcggtggtcatggggcctctcttgtctgttcttgtaattatggcgggcagccgtgaaaattgttcagtttcgaaaaaatatattcacaaaggaatgctgtcaaagcgcgaagatgaacgtttgtccgaaaaacgaccctccggtttcgttttcgcggccaatcgaatatcgctaccgaggcacgcgggccgcggcatcggcgcccgtgcagcaggggcggcgatggcttaaggtaggcgccggttttcagccaacgttcttctccgggagtgaccatgacccctgccatcgacctgctgaaaaaggcccgcgccgcgcacaaggtgctcagctacagccacgaccccaaggcaccttcctatggcctggaggccgcggaaaagctcggcctggacccgcagcgggtgttcaagacgctgctcgccgccacggagaagggcgagttgctggtggcggtggtgccggtgatcggcagtctcgacctgaaggccctggcccatgcggcgggggcgaagaaggccgacatggccgatccgcaggcggcgcagcgggctaccggctacctggtgggcgggatcagcccgctggggcagaagaagcgcctgcgtaccttcatcgatgaaagcgcgcggcagtacccgagcatccatgtcagcgcaggacggcgcgggctggaagtggagctggcggccgaggtgctggcccagctgacccagggttcgttcgccgccatcggccgtgaatgagccgctaatcccgccggcctagcggtcggcattcgtcttacttttcaatctgtcaggttttccatgtcccactatctcctcgccatcgaccagggcaccaccagctcccgcgccatcgtgttcagtgcccagggcttgccggtggcgagctgccagcaggaattcaagcagtacttcccgaaggacggctgggtggagcacgacggcgaggaaatctggctgaccaccctccaggtctgtcgcgacgcgctcgcccgcaagggcttgcgcgcggccgacatcgccgccatcggcatcaccaaccagcgcgagaccacgctggtctgggacgccgccagcggcgacctgatccacccggccatcgtctggcaggatcgtcgtaccgccgactactgtgccgaactcaaggccgccggccacgaggcgaacgtcagcgcgcgcaccgggctgctgatcgatccgtatttctccgccaccaagctgcgctggatcctcgacaacgtgcccggcgcccgccagcgcgccgaacgcggcgagctgcgcttcggcaccgtcgactgcttcctgctctggcgcctgaccggcggccgctcccatcgcaccgacgcgaccaacgcttcgcgcaccctgctgttcaacatccacagccaggactgggacgaggaattgctggcgctgttcgagatcccgcgcagcctgctgccggaggtactcgactgcgcggcggagttcggcgtcagcgagccgtcgctgcttggcgcggcgatcccggtgctgggcatggccggcgaccagcaggccgcgctgatcggccaggcctgcttccagccgggcatggtgaagagcacctacggcaccggctgcttcatgatccagaacaccggcgagcagccggtgacctcgaagaaccgcctgctcaccacggtcggctaccgtctggacggcaaggtcagctacgcggtggagggcagcatcttcgtcgccggcgccgcggtgcaatggctgcgcgacggcatcaagctgatcgaccacgcccacgagagcgaagccctggcgatccaggccggcgactccaacggcgtctacctggtgccggcctttaccggcctcggcgcgccctactgggacccgaaggcgcgcggcgcgatcttcggcctgacccgcgacaccggaatcaaggagatcgtcaccgccggtctgcaatcggtctgctaccagacccgcgacctgctcgaagcgatgcgccaggacggcacgccgcccagcgcgctgcgggtggacggcgggatggtggtgaacaactgggtgatgcaattcctcaccgacatccttggcgtcaccgtggagcgcccggaagtcaccgagaccaccgccctcggcgtggcctacatggccgggctgaaggccggcttctatcgtgacctggacgacatcgccagccactggcacctgcagcgccgcttcgccgcacacatggccgaggagcgccgcggcgaactctacgccggctggcagaacgcggtgcgacgggtgcgcagcgaggcctgagcggcgtttcgcggaaaaaggcggcgtttttgccggcggcttcacaacgccggcaggtcgccgcaaacgcccgctcgggcaatgggtcgaaggcagggcgaagtcccactgttacgatcggaaaagatcgcactgtatcgcccatcccggagcctgcggcggcatgctgtggcgatcgttcccaggaggtctgccatgcagctcgagttccaccaggtcgacgcgttttcttcccgcccgttcagtggcaatcccgccgtggtttatcgcctcgacgcctggctggcggacgagctgatgcagatgatcgcgaccgagcacaacctctccgagactgccttcgtcgttcgcgaaggagaggcctggcggatccgctggttcaccccgagcgtcgaggtggcgctctgcggccacgccacactggctgcggcccacgtactgttcgaggtctacgacgagccgggcgagcgcctggaattcatctcgcgctccggtgcgctgcgggtcaaccgcgaggacgagcggctggtcctggatttccccgcgcagtatccgagcgaggtcggtagcaccgtcgagctggagcaggccctgggcctgccgccggtggacgtgctgggctccaccgacaagctgctggtgctgctcgagtccgaagaggcggtgcgcgcctgtcgccccgacttcgcggccctggcgcggctgccctggcgtggagtgatcgtcaccgcgcggggtctgcagaaggatttcgtctcgcgcttcttcgccccggcgatgggcgtcgacgaagacccggtcacaggctccgcgcattgcagcctgattccctactgggcccagcgcttgaacaaactgtcgctgaccgcccagcagtgctcggcgcgcggcggcgagctgtggtgccggttggagggcgagcgggtgagtatcgccgggcatgcggtgctggtggcgagcggaaggattcgattgagctgagggccgcttcaggaggggggatgacctcgtgcatgccagacctccacataccgaagccctgatccgtagggtgaataaccgcttgcggttatccgccgcttatccgggggtatcggcggataccgcctgtggcggtattcgccctacaggccctggaaacaccggacagctcccccggacatttccgcaggctctctcagaagcccgggaattggataaaaacccagtaggaggatgatggaggggccggcaaatccatcccgcagggacaggaccgaacggcactgccctctattttctgagggcaaaaaagacgcgggccgcaggtgcgggaacacctacgacccgctaaccacaaaccagcttataaaggagctgacccatggctaagccgaatgatacgtccaaccccgaggtaacagaatcgtccccccgcttcgtcccgctgctacccacctcccaggccgacatgtgtccgcgtagcgccaccctgtacgtggacacccatgcactccccacgcacttgttcgacaacgcgaaagtgcgcttgaggtcggcgatcaacatcctggccatgacccgtttgctcgatgagaaagaagagcccggcggcaccctggcctacatcaacggtgcgttgctgtcgctgctcagcgatgccttgtccgaaatcgaggcgggccacccgagcctgtagcgccgctccctggcgcgacgcccccggcctggccgggggctttgcggcatcgccatcacaagacctttcgcgcccgaacggcacgcttgatcgccgtcccggtcctcgcgaaacggccgccaattgcccgaagcttccgacccttttttcggacgatttcttacgcccttataaatcagcaagttacgagacctcgaaaaaagagggtttctggcgggaaaaactcggtatttctttttccttcaaatggttataggttttcggggctagttcactgccgtataggcagctaagaaacggtagagacgtcggtgagcgctgcgatctgcgttcactgccgtataggcagctaagaaatcgacgttgccgacccgcggccgcgcccggttgttcactgccgtataggcagctaagaaattgatgatgccgtcctgctgtttgccggcgatgttcactgccgtataggcagctaagaaatagtgtggaattgatgtgcgcatcttcttaaagttcactgccgtataggcagctaagaaatgtgccgggcaggctggccagcgcctcattgagttcactgccgtataggcagctaagaaagtcggcctggagtttcgtcgggcgtacatcaggttcactgccgtataggtagctaagaaacaagcggacggtgacacggactatcagaccgggttcactgccgtataggcagctaagaaatccggcacgctgtgctgagcctgagctacagggttcactgccgtataggcagctaagaaaatctcagcgccgcctgttctgccggccgcatcgttcactgccgtataggcagctaagaaatacgggcagtcacggcgaaaggcactcagcgagttcactgccgtataggcagctaagaaatcgcgcaatgatttcagccgcggagcgcataggttcactgccgtataggcagctaagaaaatagataacacgtgtgaccgcgaccactaccggttcactgccgtataggcagctaagaaactcaagaaagagcagaacggccagcctgcgccgttcattgccgtgtagtcccgtagggcgaatgccgccataggcggtatccgccctacggatcgggttcctggcatccacgaagtgaggcttgccctccaagtggtggggcggcaaacccgccccgtcaggaggccgagcggaatcgttgcggagggggacgagtggcaggatgccgcgagagccgcctcggtccacgaaggaccgtggcggcgtgccgccgggagcaacgatgcagcgagggcaccccagccgagaagcggctggggccggatgccggggcgagtcttttggttccttttggacgcttgcaaaaggaactcgcctgggaaggcgaaacaagaggccaaggcaggcacagaaaacagcttgagcagcaaacatgaagcccgctcgaacgtcccgtagggcgaataccgccacaggcggtatccgccgatgccctggagagccggcggataaccgcaagcggttattcgccctacggatcgggctcctggcatgccctccgagtggtggggcgagtcttttggatgcttgcagaaggaactcgcctggaaaggcgaaacaagaggccaaggcaaccacgacgcccgctcaagcgctaagcaacagcttccccccttagtgccgtgcaggcagcgacgggagctgggggccagtgcacgcattcacggcccgccaggcagtccccgtgcacccggtgccgaaacgccaccttcgtgccctgagtcatggccaatgccccacggcaagtcgctacccctcagtacccatccgccaccggtgccaggtagagcccgcccgcaccgagggtaatgcgcaggttgcggatctccccggcgcgcagggtcagggtctgtccggcgaggatggtcatgccgttccggcaggcgtcgccaggaccgttcggcgcaagacgcacgtccaccgcgccgggttgcaggttcagggccaggctggcgcccggttgcaggttgccgaccagttcgtcgtggacgtacaggccgacatcgcaggcagtgccggactcgacccgctcgcgggaaacgttcagcaccgcatagccgatcggcgccgggtcgggttgcgcccagccgccgctggccggttgcgggtccgcggcgagcgccgggagggcgcaggccagggcagcggtatggagcagcgggcgaaggatggggaacatggcgggcctcggcggcggggggcgtaaggaaaagcttggccgaagccggggcccgggacaagtcgggacgggcatccgcgtgcccgtccgtcgctggggtcaggcgccgcgttgcggcagcatggcgcgcagtacgtcgtccttctgcacgcggtggtgccagatggccgcggcggcgtggccgaggatcagcgcgaaaagcaggtactggacggtgacgtgggtgccgccggcgaacgccttgaaggcttccggcaggtcgaacgggccgatctgcaccagccagaacaggtccagcggacgcttgccggcgagcatgccggagagcggcatgacgatcagcaccgcgtacagcaggaaatgcccggccttggcggccgcgcgctgccagtccgggttcccctccaaggtatccgggacaccctggacgcggcgcagcgccaggcgtgtcagggtcagcaggagtaccgccacgcccagcgacttgtgcagggtgaagacgttgcccttgccgccgagcaggccggcgaagaagtcggcgccgtagggcagggcgatgatcagcaggaccgcgacggcgctgagccagtgcagggcgatctgtgacggggaatagcggcggatggacatggttctacctcgtgaagaacaaggtgaacatgttaaccatgtgctttgtagggtttaagcctctttactccgcctttacccgttcttgacgctttgtcggttaccggatatttcgaggattgaccttgacaccatgtcaaggtcgaaaatcgccccatcgatgaccaacaggaggcaataccatgcaagtcttcaaggttcagggcatgacctgcggccactgcgtacgggcgatcacccatgcggtgcaggcgaaggattcggcggcggacgtccaggtggatcttggcgccggcgaagtccgggtcgccagccggctcgacagcacccaggtactcgaggcgatccgcgaggagggctacggcgccgagctggcctgaccccagtcgcgcaccaggccgcggaacatcggctccagcaggtgttccgcgtccgtatccgggtcgaacaggcgcgggtcgcgcaaccagtcgttgaacaggcccaggatcagcgcgtgcaaggcgcgcgaggcgatcctcggggtcatgcccggatgcagccgcacacggcattcgtcgcgggcgaacaactgctcgcagagttcgatgaacatctgcacgaaggcgttgttgcgttcctgcgcctcgcgcagttcctcggtgaattcgcaacgttgcatcaggatggtcaggatgcggcgcttcttctcctgcgtcagcaacgattgcacggcctccaggcagaggtcgtagagcgagcgcagcgggtcgctgccatcgcagccggacaggcgctcggtgagttgctccggcggcaggcgtacctggttgagcatctcgttgaacaggtgggccttgttctggaagtgccagtagacggcgccacgggtcaccccggcggccctggcgatctgttccaggctggtatgggacacgcccttttccaggaacagttcctcggcggccaggaggatggccgtacgggttttttcagaatcttcctttgtgcgtcgcatgctgtgctgggtagtcgaatcggtctcggcaacggggcggggagtgtaccgattttagccgcgctcgggcggactcgaagtatttcgacaccacctttgtctaatgctgctcattcatgagtcgtggattccgcggttccacggtctccggccatgatcgacgggcgtcttcggtgttatgctgcgcgctgctttttcggcgactccccggctgtccgtagcatcttcccgccagtaccggccttcaggcctggagccgcccgccctcacagacgattcaatgataggcgtcgtcgtcccgcttgccgggagccgcgcagggaagtgccttgcctgccaccgacgcgccccgtgccgagcgatccatgaacctgcgcatcctgctgatactgggagccctgagcgccttcgggccactggccatcgatttctacctgccgagcttcccgaccctggccaaggccttcgccaccgacgtcgagcacgtccagctgagcctggccgcctacttcgccggcctgtccatcggccagttgctctacggcccggtggccgaccgctatggccggcgcctgccgctgctggtgggggtgagtatcttcaccctggcctcggccgcctgcgccctggcgccgagcctggagtggctgatcgccgcgcgcttcgtccaggccctcggcggctgcgccgggatggtcatctcgcgggcagtggtgcgtgacctgtgcgatccgatcggcgccgccaaggcgttttcccagttgatgctggtgatgggcctggcgccgatcctcgcccccgtggccggcggcctgctgctggactggcagggctggcaatcgatcttcgtctgcctgaccctgttcgccgccctggccggcctcggcgtggcgttgtggctgccggaaaccatcccggccgacggcgagcgaccgccgctgtccggcgcgctggggcagtaccggcggctgttcgccgaccgcctgtttctcgcctatggcctttccggcggggtggcgatggccgggatgttcgcctacatcgccggttcgccctacgtgttcatccagctctacgggattcccgccgagcactatggctggctgttcggcagcaatgccgcgggcttcatcgtcatggcacaggtcaacgcgcggctgctgcgctatcgcgggccggcgttctggctgcggcggatcatctggggctacctggcgtgcggcctggccctgctgggcatcgcttcgctgcaaccggccacgctgtggccgctgctggttccgctgttcggatgcgtggccagcctcggctgcatcattcccaacgcttccgcctgcgccatggccggacagggacagcacgccggcagcgcctcggcgctgatgggcagcctgcagttcagcgtggcggcgggcgcttcggcgctggtcggcgtgctccacgacggcacggcgatccccatgactctggtgatcgccgtctgcggcgcggtcgcgaccctgctcgcctggcagaccgggcgcctggagcgccaggccgcctgagcgcggatcaggccgttcgctgtttcagttcgggcagcacatggggcgcgcgcaggcgcgcctcgaggcggtcgacgaaacgccgggcctcgctttcgctacggaagttgacggcctgctggtcgaggcagacttgccagcattggcctttcggggtttgcgacgggcggacgaggatgttcatggcgattcatccatcggggctggaaagggagcttcagtctagtcctgtcggcccggaaaacactgaccgggatcagtttgccgacaactggtcgccgcttcgtttacagccccgccgcagagcgcttcaggctcctccctcgccctgccttacccgctgccggtaggcgctcggcgacaaacccatgaccttgctgaacaggcgcgagaagtagtagctgtcgtcgtagccgaccgcctggccgacccgagccacgctctggtcgctgctgtccagcaactggcaggcgtactcgatcttcaggtgcaggaagtgctggataggcgtacggccggtgatcgccttgtagcgactgacgaaatggaacttcgacaggttgcagaaggccgccaggcgttccagttcgaggcgcgcatgcaggtgttcgcgcatgtaggcgtgcagcccgtcgaggtccaggctgccctcgcgcagcgggcgcagcagcggtagctggcagagcaggctgcgcaggcggctggcggcgagcaggaagtgctggaagcggtagccgctgtggcgcacctccagcagttgctcgaagccgccgagcagggcgtgttgcaggccccaatggcgcagcggggtgtcgcggtagccggcgctgtgttgcagccaggtggcgctgtcgccgcgcaggtgggtccaaaagatggtccagggttggcggtcgtcggcggcgtagtcgtgggccatgcccggcggcagccagagcaggtcaccgctgccgacccggtattcgcgccaggcgtcgccctcgcgcacgcgcaacaggccctggccttcgctgcaatagatcagcaggtgctcgtcatggcgctcgcggctcatgcggtggtcgcgggcgcgccggtagtggcccagggaggtggggtagaggtcgcggctgagcgggtggaccgccagtttctccagcagcgccgccgggatcggcaagcgcaggctgtcggccggcaggggccagtcggaggtgtgcgacatgtcggtagccggctccgcaatatagtccatgaacaacacaatttagtcgatctcgcgaccttccgcccagtgatagcttcttggccaaagcgaggtccgaatcgacctcgtaccagtccgccacaacaataaaagccggcctggccggtgcaggagggttcatgtcagtcccagtccgccacctcatcgcgggagccttcgtcgaaggtctcggcgcccagcgcatcccggtcagcaatcccctcgacaacagcaccctggcggagatcgcctgcgccagcgcggagcagatcgagcaggcggtggccagtgcccgcgaaaccttcgccagttggaaggaaaccccggtttccgagcgcgcgcgggtgatgctgcgttaccaggcgttgctcaaggaacaccacgacgaactggcgaagatcgtctccagcgagctgggcaagactttcgaggacgccaagggcgacgtctggcgcggtatcgaggtggtcgagcacgcctgcaacgtgccctcgctgctgatgggcgagacggtggagaacgtcgcccgcaacatcgacacctacagcatcacccagccgctgggcgtgtgcgttggcatcaccccgttcaacttcccggcgatgatcccgctgtggatgttcccgctggccatcgcctgcggcaacgccttcatcctcaagccttccgagcaggtgccgctgaccagcgtgcggctcgccgagctgttcctcgaggccggtgcgccgaagggcgtgctgcaggtggtgcatggcggcaaggaacaggtcgatcagttgctcaagcacccgcaggtgaaggcggtgtccttcgtcggctcggtcgccgtcggccagtacgtctaccacaccggcaccgcgcacaataagcgcgtgcagagcttcgccggggcgaagaaccacatggtgatcatgcccgacgcggacaaggcacaggtcatcagcaacctggtcggtgcctcggtgggcgcggccgggcagcgctgcatggcgatctcggtggcggtgctggtgggggccgcccgcgagtggattccggaaatccgcgacgcgctggccaaggtccgccccggcccatgggacgacagcggcgccagctacggcccggtgatcaacccgcaggccaaggcgcgcatcgagcgcctgatcggccagggcgtggaggagggcgcgcaactgctgctggatggccgcggctacaaggtcgagggatacccggacggcaactgggtcggcccgacgctgttcgccggggtgcgcccggacatggcgatctaccgcgaagaggtgttcggcccggtgctctgcctggccgaggtcgacagcctggagcaggcgatccgcctgatcaacgaaagcccctacggcaacggcacctcgatcttcaccagctccggcgccgcggcgcggaccttccagcaccacatcgaggtcggccaggtgggcatcaacatcccgatcccggtaccgctgccgttcttctccttcaccggttggaagggctcgttctacggcgacctgcacgcctacggcaagcagggcgtgcgcttctacaccgagaccaagaccgtgaccgcgcgctggttcgacagcgatagcgtggccgggaccaacttctcgatccagatgcgctgaaagggagacggaccgatgaccgacatcgcattcctcggcctgggcaacatgggtgggccgatggccgccaacctgctcaaggctggccaccgggtgaatgtcttcgacttgcagcccaaggccgtgctgagcctggtcgagcagggcgcgcagggcgccgatagcgccttgcagtgctgcgaaggcgccgaagtggtgatcagcatgctgccggccgggcagcacgtggaaagcctgtatctcggcgacgacggcctgctcgcgcgggtcgccggcaagcccctgctgatcgactgctcgaccatcgccccggagaccgcgcgcaaggtcgccgaggccgccgcggcgaagggcctgaccctgctcgacgcgccggtttccggcggcgtcggcggcgcccgcgccggaaccctgagcttcatcgtcggcggccccgccgaaggcttcgcgcgggcccggccgatcctcgagaacatgggccggaacatcttccacgccggcgatcacggcgccggccaggtggcgaagatctgcaacaacatgctcctcggcatcctcatggccggcaccgccgaggccctggcgctgggggtgaagaacggcctcgacccggcggtgctgtccgaggtgatgaagcagagttccggtggcaactgggcgctgaacctctacaacccctggcccggggtgatgccgcaggcgccggcgagcaacggctatgccggcggtttccaggtgcgcctgatgaacaaggacctcggcctggcgctggccaacgcccaggcggtgcaggcctcgacgccgctcggcgcgctggcgcgcaacctgttcagcctgcacgcccaggccgatgccgagcacgaggggctggacttctccagcatccagaagctctaccgcggcaaggactgacccctacgaccaaaggttgatggcgggtgcccggcgcccgcccatactccaaggctcactcactgcttcatccctaataagaacaatcagagggctggaacatgacgtacctgcagcagcacgcccgctcgatcgccgagccggccgcgttctgggccgaacaggcccgttccctggcctggtaccaggcgcccgcgaacatcctcgaaagcctgcccgacggcacccatcgctggttcgccgatggccgtctgaacagcgcctacctggccctcgaccggcagatcgaggaggggcgcggcgaacagaccgcgctgatctacgactcgccggtgaccggcacccaggaccgctacagctacctgcggctgcgcgacgaagtggcgcgcctggccggcgccctgcgggccctcggggtcggcaagggcgaccgggtgatcatctacatgccgatggtgccgcaggcggccatggcgatgctcgcctgcgcgcgcctgggcgcggtgcattcggtggtgttcggtggcttcgctccctacgagctggctctgcgtatcgacgacgccacgccgaagctggtgctcaccgcttcctgcgggctggagttcgaccgggtgatcgaatacaagccgctggtggacaaggccctcgaactggcgatccaccagcctgcccacgtcatggtctggcaacgcccgcaggcgcccgcgcgcctgcacccgggccgcgacctggactggcaggactgcctcgccgccgccgagccggccgatccgctgccggtggccagcggcgatccgctgtacatcatgtacacctcgggcaccaccggtaagcccaagggtatcgtccgcgacaacggtggccacgcggtcgcggtgcgctacgcggtccgcactatctacggcatgcaggccggcgacgtctggtgggggatctccgacgtcggctgggtggtcggccactcgctgatcgtctacggcccgctgatgtgcggctgtaccacggtgttctacgaaggcaagccggtgcgcacgccggacgccggcgcctactggcgggtgatcgaagagcacagggtgaacagcctgttctgcgcgccgacggcgatccgcgcgatccgcaaggaagacccgcatggcgaacgggtgaagcgctacgacctgggttcgctgcgccacctgttcctggccggcgagaagctcgacagcagcacccagcactggctggaggagcacaccgggcggccggtccacgaccattggtggcagaccgagaccggctggccggtgaccgcgccctgcatcgggatcgccggccacgacctgcgggccggctcgaccaaccgcgcggtgcccggctaccacgtgcaggtgctggacgacgaaggccggccgctgggagcgaaccgacagggcgcgatcgtcatcgccctgccgttgccgccgggctgcgcgcagaccctctggggcgaccacccgcgctacctgcaggcctacctgggcaactatcccggctactaccacaccggcgacggcggttatctcgacgaggacggcttcgtctacatcatggggcgcaccgacgacgtgataaacgtttccgggcatcgcctctccaccggcgagatggaggaacgcgtggcgcagcaccaggcggttgccgagtgcgcggtgatcggcgtgcgggacgaactcaagggccacgtgccgctgggactggtggtgctcaaggacgatgccgggatcgccgccgagcaactgcagcgcgagctggtggcgctggtccgcgaacagatcggcgcgctggcctgcttccagcgggtggtggtggtcaagcggctgccgaagacccgctccgggaagatcctccgcgcggtgctgcgcaagatcgccgatggcgaggactacgcggcgccatcgaccatcgacgacccgacgatccttggcgagatcgaggctgcgctgagggtgcgcaaggcgggatagcaaaggccaggggcacggcggtagggtggaaaacgccgcgccccgtggtcctgccgttcagaaccgttcgagaacgatcttgcccttggcccggccgctctccagcagcgcgtgggcgcggcgcaggttggccgcgtcgatgcggccgaaatgctcgccgacggtggtcttcaacacgccttcgtcgatcagcccggcgacccgctccagcagccggtgctgctcgatcatgtcgtcggtctggaacatcgagcgggtgtacatgaactcccagtgcagcgacaggctcttctgcttcagcttgccgatgtccagcgacgccgggtcgtcgatcagcgccaggcggccttgcgggcgcagcgcggcgacgatctgttcgaggtgctggtcggtgtgggtcaggctggcgacgtggctgacctcggcgacaccgatccgcttcagctcttcggccagcggcttgccgtggtcgatcacatggtgcgcgccgaggtcgcggacccaggcctgggtctctgcgcgcgaagcggtgccgatcacgttcaggccggtcagttgccgggccagttggaccaggatcgaaccgaccccgccggcggcaccgaccaccagcaggctctggccctggtcggccttgccttcggcgatctgcaagcgctcgaagagcagttcccaggcagtgatggtggtcagcggcagggccgcggcctgggcgaagtcgaggcttttcggcaggtgcccggcaatgcgctcgtcgacccgatgcagctcgctgttgctaccggggcgggtgatgtccccggcgtaccagacccgatcgccaggacggaacaggctgacctcgctgccgaccgcgcgcaccacgcccgccgcgtcccagcccagcaccttggcctggccggcttccggctgggcgcgctggcggaccttggtatccaccgggttgaccgagatggcgcggacctccaccagcaggtcgcgcgggcccggcgtgggctcgggcagttcgaggtcgagcagggcgtcgggatggtcgatgggcagggattggtagtaaccgacagctttcatgggaactccgggaaacgggcctcaggcgaggcgatagagttggtcgatcttcacgttctgcagcagggcttcgttgccgcggctgaagcgcaggaagtgttcggtgttctggtgccgctccagggcggcgtcgtcgcgccactgctcgatcatgtagaacaggtgggagtcgtggcggtcctggtgcaggtcgtactgcaggcaaccagcctcggcgcgcgacggggcgaccagggcgcgcaattcgcgttccagggcctcggcgtggccgggggcggcggtgatggtggcgatcagggtgaggggtgtgctcatggtgggttccttcgatggggcggagtcaggatgggctatttcaaatcgctgaaaaacaggctatcagggaagactctttcaaaggaatcttgaaaatgctgcgttacgacgacctccaggtgttcgtccacaccagcgacagcggctcgttgtccgccgccgcgcgccagttggagatttccccggcggtggccagcgcggcgctgaagcgcctggaaagcgagctggaggtacgcctgttcgcccgctccacccgcagcctgcgcctgactcccgagggcgacgcgttcctcctgcatgcccgcgcctcgttgcgcagcctggaggaggggcgccggttgctgcagggcggcaaggaccagatcgccggggtactgcagctttccgcgccctccgacttcggccgcaacctgctgctgccatggctcgacgagttccaggcgcgctatccgcaactgagcctgcgcctgctgctcggcgaccgggtgaccgatctctaccggcaaccggtggacgtggcgatccgctacggcgcaccggccgactccagcctggtcgccctgccgctggcgccggacaaccggcgagtgctctgcgccgcgccgggctacctggcggagcgcggcgagccgcgccagccggacgacctgcgcgagcacaattgcctgctctaccaactcggcggccgggtacacgaccgctgggcgttccagcggggccgccgcagcctgaccctgacggtcgccggcgaccgggtctgcgacgacgctgacgtggtgcggcgctgggccctggccggcaaggggctggtctacaagtcctggctggacgtggccgaggacgtgcgcgccgggcgcctgcgcctgctgctgccggactggcagggcgaggcgacgccgatgaacctcttgtgtacccaccgcgcccagttgacccgcccggtgaccctcttgcgcgcgttcgtgcgcgagcgttgcgacgcattgctggcggaggctccatggacgaggaactgaaccgggcggcgagcctggccatcgagctggcggacgtggacagcgccgcgcgcttgcacgaacgcctgcgcgaggccctggcgttgccgccgtggtacggatgcaactgggatgccttctgggacgccatcagcggcctggtgccgatgccccggcgattgcgtctgcaaggctggagcgacttcgcccggcgcctgccggaggaagcggcgcagctttcggcctgcctggaggcgttgcgcgagacgtacccgcaactggcgccggaagtcctgcgcgacgcttgatcagtcccagccgaacagctcggcggcgttgcggctgctgctcgccgccagttcctcggcgtcgaccccgcgcagctcggcgagggcgcggcagatgtccggcaggtgctccggactgttgcgctggccgggatgcatcgatggcgccatgtccggcgcatcggtttccagcacgatggcctcggccggcagctccgccgccaccttgcgcaggcggttggcctgcggccaggtcggcgcgccgccgaggccgaggcggaagccgagcttgaggtactcgcgggcttcctcgcggctgccggcgaaggcatggatgatgccacggcgctccaggcggatgcgcttgagggtggcgatggtcgccgcgtgggcgcggcgcacgtggatcagcgccggcaggcggaattccgcggccagccgcagttgggcctcgaacagcgcctgctgggcgtcgcggtcgaggtgttccaggtagtagtccaggccgatctcgccgaccgcgcagagcttcgtctcgccgcgcaggcgttgcagccactggcgcaggtcgtccaggtgctgcgggcggtgccgcgccaggtagacggggtgcaggccgagcgccgcgtacaggccatcctcggcctgcgccaggtcccagacccgttgccagttctcgcggtagacgccgagcaccacctggcgctcgacccccagcgcgcggctgcgttgcagcagcgcggcgcggtcggcgtcgaagtccgggaagtcgaggtggttgtgggtgtcgaccaggcgcatggcggccggctcagtcgcgcagcttgagttgccgggggacggcgtgcaggcccggccggtagtcgttctcctcgaccgcgcggagcgccagttcgagggcgttggcggcgatcagcgcgtgctgctggtagatcgagttgaccttcagcggcacgaagtcgagcaactgggtgtcgccgaaggtcgccacccgcaagccttcgggccaaccgtcggcgcgcgcctggaacacatcgaagacgccttcgaggagtacataggcagtggtcaccagggcgtcgggcaggtagcccaggcgctcgagcaattgctccatcaggcggcgtccgcactcgcggctgaacacctcggcatgctcgacgatgacctcgccgcggaagtccttcagcgcctggcggaagccggcggcgcggtcgtggctgatgatcaggtccgcccgcgcgccgagcagggcgatatggcgcggcgccggttgcaacagggtttcggtgaggcggcgcgcggcgtcctggtcgtcgctgatcaccgaggcgaagcgctgcgggtcgagctggcggtcgatggccaccaccggcaggccttcggcgaccagccgggcatgggtatcatccccggccggcaggcaactggcgacgatcagcgcgtcgcagcggcgcgcgcggaacaggttgaccacctggcgctcggtctccggctcgtcgtcggagcaggcgatcagcaactggtagccgcgcgcccgggcgccttgttcgagttgcttggcgaggcgggcgtagctggggttttccaggtccgggaggatgaagccgagggtgcgggtctgcccgcggcgcaggccggcggcctgctggtccggctggtagccgtgttcctcgaccacggcaagcacgcgctcgacggtggcggcgctgatgcgccgctgggcggccttgccattgatgacgtagctggcggtggtcaccgagaccccggccaggcgggcgatatcactgagtttcaaaccgatctctactggaggcgacgacaagttgggcttcaaggatcaatcattatcgggtaacgtgccaatttaattaagtgaatcgattcagcaaaagattccggcgaagccggcgccccctgccccaggctgcctcgcgcagcccgaacgcggcgccgcctacgctatggcaggtcaatgacaacaagcggatcaccgccccaggctgtacggaaggctcccgcgagccgctttccgctaccgccggcacatcccgcgcccgcgcctcggcgcggcgggacgatccggacgtgagacggggagccgttcgctcctgaggaggtttccatgctcgaactcgatacccggcagatccgcatgggccagcgcgccgcggacaaggccgaagccctgcgcctgctcggcgcggcgctggtcgccgacggcctggccgcgcccggctatgccgagggcctgaaggcgcgcgaggcacaaggctccacctacctcggccagggcatcgccataccccatgggaccccggatacccgcgagctggtcttcagcaccggtgtgcgcctgctgcaattccccgagggagtggactggggcgatggccagcaggtctacctggccatcggcatcgcggcgaagtccgacgaacacctgcagctcctgcaattgctcacccgcgccctcggcgaggccgacctgggaccggcgctgagcgcggccgccagcgccgaggaagtcctcggcctgttgcagggcgcgccgcaggaactggcgctggacgcacaactggtcggcctcggccagaacgccgaggacctcgacgaactggcctggctcggcgcgcgcctgttgaagaaggccggctgcgtggagaacggcttcgccgccgtgctccagcagaccgaaccgttgccgctgggcgacgggctgtgctggttgcacagcgaacaattggtgaagcgccccgggctggccttcgtcactccggcgcaaccgttgcagcaccaggggcaactggtcaccgggctgttctgcctggccagcctgggcgaagcgcaccaggcgctgctcgaacgcctgtgcgacctgttgctggaagggcgtggcgccgagctggtgcgcgccaccagcagccgcagcgtactcgcggcgctcggtggcgagctgccgccggactggcccagcgcgcgagcggtcctggccaacccgcatggcctgcatgcccgcccggcgcaggcgctggcgcagctggccaagggtttcgccggcgagatccgggtacgcctggccgacagcgagtcggcccccgtctcggcgaagagcctgagcaagctgctcgccctcggcgcgcgacgcggccagacgctggagttcagcgccgagccggcgatcgccgaggacgcgctgccagccttgctggccgcggtgcgcgaggggctcggcgaggaggtcgaagcgctggcggaggaggccttgcccgatgccgtcggcgaggcggaagaggatgcccggccggcgccgctgcgcgccggcgagcgcctgcaggcaatcgccgcgtcgccgggcatcgccagtggtccggcgcatgtccaggtggcgcagcgcttcgagttccagccgcgcggcgagtcgccggcccatgaacgcgagcgcctgctgcgggccaagcgggcggtggacgaggagatcgtcggcctggtcgaacgcagcacggtgaaggcgatccgcgagattttcgtcacccaccgggagatgctcgacgatccggaactggccgagcaggtgcaactgcgcctgaatcgcggcgaaagcgccgaagcggcctggagtcgggtggtggaagacagcgcggcgcaacaggaggcgctgcacgacgcgctgctcgccgagcgcgccgccgacctccgcgacctcggccggcgggtgctggccaggctctgcggggtggaggcgccgcgcgagccggagcagccgtacatcctggtgatggacgaggtcggcccctccgatgtcgcccgcctcgacgcccagcgggtcgccggcatcctcacggcgcgcggcggcgccacttcgcacagcgcgatcatcgcccgcgccctcggcatcccggcattggtcggcgccggcgcggcggtgctcggcctggagcctggcacggcactgctgctggatggcgagcacggctggctgcaggtggcgccgagcaccgaacagttgcagcaggccgccgccgagcgcgacgcccgccagcagcgccaggcccgcgccgacgcgcagcggctggagcctgcgcggacccgcgatggccacgcggtggaagtctgcgccaaccttggcgacaccgccggcgccgcgcgcgcggtggagctgggcgccgagggcgttggcctgctgcgcaccgagttcgtcttcatgaacaacgcccgcgcgccggacctggcgacccaggaagcggaataccgtcgggtgctcgacgccctcgacggacgtccgctggtggcgcggaccctggatgtcggcggggacaagccgctgccgtactggccgattccccacgaagagaatccctatctgggcctgcgcggtatccgcttgaccctgcagcgaccgcagatcctcgagacccagttgcgcgcgctgttccgcgccgccggggagcggccgctgcgggtgatgttcccgatggtcggcagcctcgacgaatggcgccaggcgcgtgacctggcgctgcgcctgcgcgaggaaatcccgctggccgacctgcaactggggatcatggtcgaggtgccctcggcggcgttgctcgcgccggtgctggcccgcgaggtggacttcttcagcgtcggcaccaacgacctgacccagtacaccctggctatcgatcgcggccacccgagtctttcggcccaggccgacggtctgcatccggcggtgctgcaactgatcgacatgaccgtccgcgccgcccacgccgagggcaagtgggtcggcgtctgcggcgaactggcggccgacccgctggcgttgccgctgctggtcggcctgggagtggacgagctgagcgtctcggcgcgcagcatcgccctggtcaaggccggcgtgcgcgaactgcagctggtcgctgcgcgcggcctggcccgcaaagccctgggcctggcgagcgccgccgaggtccgggccctggtggaagcggaggtgcagtaatggcgcggatcctgacgattaccctgaaccctgcgctggacctcaccgtgcgcctgcgccagctggaactgggggcggttaaccgcagcgaggcggtgctgacccaggccgccggcaagggtctgaacgtcgcccaggtgcttgccgacctcggccatcggttgacggtcagcggcttcctcggcgaagacaaccagccgccgttcaccgccatgttccagcgtcgtggcttcgccgatgcgttcgtccgggtgccgggcgaaacccgcagcaacatcaagctggccgagcgcggcgggcgcgtcagcgacctcaacgggccgggcccggaggccgacgagcgagcccaggcggcgttgctcgaacgcctcgaccggcttgccggggagcacgagctggcggtggtcgccggcagcctgccgcgcggggtcgagccggaatggctgggcgaactgctgcggcgcttgcggcgcctcggcctgaaggtcgccttcgacagcagcggcgcggccctgcgcgaaggtgtgaaggctgcgccgtggatgatcaagccgaacgtcgaggaactggccgacctctgctcggcgccgatggacgacctggccgcacagcgccaggcggccgaacgcctgcgccaggacggggtaggccaggtggtgatttcccagggcgccgcgggggtcaactggttcgccgccgagggtgcctggcaggcgcggccgccggcggtggaagtggccagcacggtgggcgccggcgactccctgctggccggcatgctgcacgggctggccagcggctggccggccgagcgggtgctgcgtcaggccaccgccatcgccagcctggcggtaacccagctcgagttcggcatcggcgatccgcagcgcctggcgcggatcgaagcgggcgtcgtggtgcagccattggtcgaggaggcctgagatgaaactagcgatcgtcaccgcctgccctggcggacaggtcaccagcgtgctcgccgcgcgcctgctgcggggcgccgccgagcgcctgggctgggaaacctgcgtcgaggcgaatgccgggtcgaggcccgagggcgaactgagcgccgaacagatcgccgaagccgactgggtcctgctggtcggcgtcgagccgctggcggcggcgcgtttcgtcggcaagccggtgtatcgcgcgcgtcccgccgaggcgctggccgatccgcgcgccttcctccagcgggccgccgccctggcgagcgtggaggtcgccggggacgaggccggcctggttgcgccggaggccggagcggcaccgcggatcgtcgcggtgaccgcctgtccgaccggcgtggcgcacaccttcatggccgccgaggcgttgcagctcgcggcggggcaactgggcttcgcgttgcaggtcgagacccagggctcggtcggcgcgcgcaacccgctcgacccggcggacatcgccgccgccgacgtggtcctgctggccgccgacatcgacgtggacacggcccgtttcgccggcaagaagatctaccgttgcggcaccggcgtggccctcaagcaggcccgcgcgacgctcgagcgggcgctggcggaagggcaggtcgagagcgcgggcgcagccagcgcggtggtcgccagggacgagaagcgcggggtgtacaagcacctgctgaccggggtgtcgttcatgttgccgatggtggtcgcgggcggcctgctgatcgccctgtcgctggccttcggcatcgatgcctacaagcagccgggcagcctggcggcggtgctgaggacggtcggcgacacggctttcgtcctgatggtgccgatgctcgccggctacatcgcctattccatcgccgaccgcccgggcctggcgccgggcatgctcggcggcctgctcgccgggaccctcggcgccgggttcatcggcgggatagtcgccggcttcatcgccggctatgcggcgcgggccatcagccacgggctgaggctgccggcgagcctggaagcgctgaagccgatcctggtcatcccgttgctggccagcctggtcaccggcctgctgatgctctacgtggtcggcaagccggtggccgggatgctcgcggcactgaccgggttcctcgacggcatgggtacctccaatgccatcctcctcggcctgctgctcggcgggatgatgtgcgtcgacctcggcggaccggtcaacaaggccgcctacgccttttccgtcggcctgctctcgtcgcacagctacgcgccgatggcagcggtgatggcggcgggcatggtgccgccgatcggcatgggcctggcgaccctgctggcgcggcgcaagttcgccgagagcgagcggcaggccggcaaggcagcctcggtgctggggctgtgcttcatctccgaaggcgccatcccgttcgccgccaaggacccgttgcgggtgatcccggcgagcatcgccggcggcgcgctgaccggcgccctgtcgatgtatttcggctgcaagttgcaggcgcctcacggcgggttgttcgtgatgctggtgcccaacgcgatcaaccacgccctggcgtacctgctggcgatcgtcgccggcagcctgcttaccgggctgctctacgccgtgctcaagcgcggcgccgagccgggactggcgttggggacctcgtcctcgcgggagccggcggctggcggatagccgcgaggcggtcatgcgccctacgccacctgagctacgtggcagagggtagggcgaataacgccgcaggcgttatccgccccagcggtcgatccgacctggggcggcctcaggcctggcgcaacaggcgcatgccatcttcctgtgcgaggctggcctcgttgatcggcaacgagcaggactgcccgcgtcccatcgggtagtagtggaagccgtggcgggccatgcgctcggggtcgtagaggttgcgcccgtcgaagatcaccggggccttcaggcgctccttgagcagctcgaaatccggtgccttgaattgctgccactcggtgcagatgaccagcgcatcggcgcctcccagggtcgcctcgggggtgcccatcaggctcaggcgttcgtcgtggccatagagccgctgggtttcctgcatggcttcgggatcgtaggcgcgcacctgcgcgccgtggcgccagagcgcttccatcagttcgcggctgggcgcgtcgcgcatgtcgtcggtgttcggcttgaaggccaggccccagagggcgaaggtcttgccgcgcaggtcgccgtcgtagaacacccggatgcgttcgaacagcttgtgcttctgccgccggttgatcgcttccactgcctgcaacaggtcgctggagcaatgcgcctgctcggcgctgtggatcagcgcgcgcatgtccttggggaagcaggagccgccgtagccgcagccggggtagatgaagtggtagccgatccgcgggtcggcgccgatgccctggcgcaccgcctcgatgtcggcgcctaggtgttcggccagttcggcgatctggttgatgaagctgatcttggtcgccagcatgccgttcgccgcgtacttggtcagctcggcgctgcgcaggcccatgaacagcaagcggtcgtggttgcggttgaacggctcgtagagttcgcgcatcacctggcgcacctcttcgttgtcgcagccgaccacgatgcggtccgggcgccggcagtcggcgacggcggagccttccttgaggaattccgggttggagacgatttcgaattccagctcgcgtccgtcggcttccaggcgccgctcgatgtgcgcgcgcaggcggtcgccggtgcctaccgggacggtcgatttctccaccacgatgacgggcttgcggcgatgctcggcgatggcatcggccaccgcgaagaccgcgccgagatcggccgcgccgtcctcgccaggcggggtgccgaccgcgatgaactgcacccggccgtgttccacggccaggcgcgcatcgctgctgaaacgcaggcggccgctgtccaggccttcgcgcagcaaggcgtcgagcccgggttcgtagatgctggcgaggccctgcgcgaggcgttcgaccttgttccggtcgatgtccatgcacagtacatcgtggcccacttcggcgaggacggcggcctgcaccagtcctacatagccactgccgaatacgctgatcttcatggtgctttcctcgacggatgatgcgcgggcgcggcagcggtgcggcgggcgttgacggtcaacacgccgagcaccaccaggcctacgcccagggtcttgctggtactgaaggtttcatcgaacgccggcaggctcgccgccagcaggtagaccagcgcgtagctggcgctcaacaggctgtaggcgcggcccagcggcaggtggcgcagggcggccagccagcacagcagggaggcggcgtaggctgccaccgccagggctaccgcgagcagcgcggcgcgctccggcgtttgcccggcccaggcttcaggcagcggcaggcggctcatgccccagcgcatgccgagctgggcggcgctggccagcagcacgctgcccagcgccgccagccagccgcgtagcgcgttcatgcgctcctcccgagcagggccacgccggcgacgatcagcaacaggccggcgaggtggcggcgatccaccggctcatcgaagacgaagcgtgccgccagggtgaccaggacgaagttcagcgccagcatcggataggcgctgccgacttccacccgttgcaggagcagcagccagcagagcaggccgagcccgagggcgagcagcgccagccacggccacggactgcgcaggcgcgctgtccagccgtcggcggcgaccaggcgccagtgctccacggtgagcttctgcgcaacctggccgaggccggtcatgagcagggtggcgagcagcagcgcggcgctcatgggcgcacctgcggcaggatcgccaggaccaggttgccgttccggtagcgttcgccgtcgcccggcaacagcgccagttggtagcggtcgctggcgctgttgatccgcagcagcacggcaatcgagccgtcctggcgtgcccgccagagccactggcggatgtctgccaagggcacgctgcgctggctgtgctcggggtaggagaggccgtacttcagctcgccgcgcgtgtcgtagagcgtcacgtcgctacgacgcaggcgccaggcgagggccgaggcggcgccgaggtcgttgctcagcagatggcgggcgccggtcagttcatcgaggtgttcggcgacgaacaggtcgggggtcttgttctgcaccacatggttgggcatcgctgccggcagcagcgcgatcagcacccagctcgccagcagcggcgcggcccaggcgcgtagcgggtagcgccactgggcgaggccggcggcggcccaggcgccgatcaccagcaggaccaggaacagctcgaagggttcttcctggtacaccggcttgcgcagttgcaggtaggccagggccgccagcgcgaggagcgccaggcccaggttgagcagcccgttgccgcgcagcgcgacgctgttccccaggcgcagccgctgcaccagggcgtggcccatgagcagtgccagcggcagcaggcagggcatgatgtaggtcggcagcttgccccggctcaggctgaagaacgccagcggcaacagcagccatagcgccaggaagaccaccggcgcttggcgccgctcgtgccaggcctggcgcagcgcgctcggcagcaggccgctccagggcaggcaggcgaccgccagcaacggcaggtagaaccaccacgggcgagagtgctgggcgtcttcgccggcgaagcggcggatgtgttcgtgccagaagaagaaccgccagtagtccgcttcccgcgcatgcacggcgagcgcccagggcaggcagacgagcagcgccgccagcaccgccagcgcgccgtagccaagcagctcgcgccagcgccgctgccagagcatgtagggcagggcgaccagtaccggcagcagccaggcgaggaagcccttggtcaggaagcccatgccgcaggcgaggccgagcagggtccagccgagcaggcgcgcgcggcggctccccgcgtcgagggcatgccacagcgccaccaggctcaggttgacccagaaggtgaattgcgggtcgaggttggcatagccggactgcccggcgatcaagccgaagctggcgtagagcagcgcgcatgccaggctggtgcgcgggtcgcgccacaggcggcgggccagcaggtaggcgagcaggacgctgagggcggtggcgacgaccgaggcgatgcgcacgccgaacaggttttcgccgaagaccgcctggccgagggcgatcatccagtagccggcgaccggcttctcgaagtagcgcaggccgaggaagtgcggcgacacccagtcgccgcccagcagcatcgcctggctgatctgcgcgtagcgggtctcgtcgggaatccacaggccatggttgctcaatggaaccaggtagaacaggccgaaggcgatcagcagcagcgaacaggtctggcggcggctcatggctggcgcactcccagccagccctcgcggccggccaggcggccgcgcaccagttcggccagcggcaggctgcgcggatcgtccggcagcagttcgcccaacggtcggaagcggatgccgcgccgttcggcgcgccgcagcagttcgcggaacgccggggcgaggagcagcccctcgacctcggcgtggatggtgtagacgttgtcgcggccagcggcgaagcgttccaggatgaagtcgttgtaggcctcgcgcggcaggccgggaccgaccacctcgtcgaaggtcggcaggttcaccggcacctgcgggatgccagggctgccgtcggccaggcgcgggcggaacgcgccgcgtccgcggcagtcgctgttgtagcggaagccgaagggctgcttggcctcgaccacccggccgtcggcgcgccagccggcggcggcggaacaacgcaccggctggccgaggatgtccgccaggcaatcgctgccgcggcggatctgctcgccgagctgctgcacgctccagactccggcgtgggtctgccaggcatggtggtcccaggcgtgcaggccgacctcgtggccggcggcctgggtccgccgcatcagcgggccgagttcgcggccgatcggcttgcccggccaggcggtgccggccagcaggatgtcccagccatacaggctggcggcgcgcgagcggagcatcttccagaagaacgccgggcgcgccaggcgccagaggtggcggcccatgttgtccgggccgacgctgaagaagaaggtcgccttcagcccggcttcgtcgagcagctcgagcagccgcggcaccccgtcgcgggtgccgcggaaggtgtcgacgtcgatgcgcaggccggcctggatcacgcctgtgcctcgcgctcgcggagcgcttcgtggaggaagaagtcgagggtcttgccgatggtctcgcgcagttcgatggtgggctgccagtcgagcaggcgccgggcgttgtcgatgctcggcttgcggtgggccacgtcctggtagccgtcgccgtagaagctgcggctctccacctcgcggaagccggcgaagggcgggaactgcgcgcgcagcgggtgggcctcgaactggcgcagcagttcctcgccgagctggcggatgctcgcctcgttgtccgggttgccgatgttgacgatctgcccgtcgcagcggccgtcgcggttgtcgatgatccgcgcgagggcctcgatgccgtcgtcgacgtcggtgaagcagcgcttctgcgcgccgccgtcgaccaggcggatcggcgtgccttcgaccaggtgcaggatgagctgggtgatcgcccgcgagctgccgatccgcgccgaatccaggcggtccaggcgcgggcccatccagttgaacggacggaacagggtgaagcgcaggccctgctggccgtaggcccagatcacccggtcgagcaactgcttggacaccgagtagatccagcgctgcttgttgatcggcccgaccaccaggttcgagcggtcttcgtcgaagtccgggtcctggcacatgccgtagacctcggaggtggaagggaacaccacgcgtttgccgtatttcacgcagtagcggacgatccgcaggttttcctcgaagtccagttcgaacacccgcagcgggttgcgcgtgtactcgatgggcgtggcgatggccaccagcggcaggatcacgtcgcatttcttcacatggtattcgagccactccgaatggatgccgatgtcgccttcgacgaagtggaaatgcgggtcggccttgagccgttcgatggcgtcggagccgatgtccatgccgtggacctcgtagcgaccgtcgcgcagcaggcgttcggacaggtggttgccgatgaagccgttgaccccgaggatcagcacccgcgtgcggcgctgcggactgcatgccgcgccacgcaggcgcgcgccctcgaccaggcccagctcggtggccagttgcgtgccggccaggtacaggccgcgctcgccgcgctggccgaagcgcagcaccagcgagtcctcgccgcaggcgatccgcagcgggtcgcaggacagtacgctgcccggctcgcggccgtggttgccggcgaccacctcggcgctccagacgatcagcttctgttcgccgacctggcagaaggcgccagggtagggctgggtcaccgcgcgcaccaggtcgtacaactgccgtgccggcctgtgccagtcgagcaggccgtccgccggggtgcgccggccgaagtggctggcctggctctcgtcctgctcgacttccggcagcacgccgagggcgagcagcggcaggctgtcgcgcagcagggcgccggcggccttgcgcagcttgccgtgcaggctcagggcggtgtcctcggggtcgatggcgacggcctgctgggcgaggatcggcccggcgtcggcgcgctcgatcatgcgatgcagggtcaccccggtctgcgtttcgccgttgaccagcacccagttcgccggggcgcgtccgcggtagcgcggcagcagcgaaccgtgcaggttgtaggcgccgcgtgcggcgcaggcgagcagctcggcgccgagcaggcggcggtaatagaaggagaacaggaagtccgggcgcagttggcggatgcgctccagccacagcggatggttcacgtcctcgggcgcgtgcagcggaatgccgcgctcggcgcagaggcgtgcgaccgaggcgtagaaggtgttttcccgtgggtcgtcggcatgggtgaagacggcggcgatctcgtagccggcattgagcagggcttcgataccggtgcaaccgatgtcgtggtaggcgaagacgacggctttcgaggtcatggcgtggaaggctcgctggatgaagaggtgaaaccgacccgctgcagggccgagggaagcgcggagggcgttgcgcggaccacgcgctcgatgaagaagcgcggccgcgcgcgcacgtcgctgtacatgcgcccgaggtactcgccgagcaggcccatgccgagcaactgcacgccgctgaacatgaacagcacggcgaacagcacgaacaggccgttgccggcccaggcggcgccgaaggccaggcgcagcacgaggaggaacagggcgaagaggaagccggccagggccatgccgccgccgaccaggctgagcaggcgcagcggcgtggtggtcatgcaggtgaccaggtcgaacatcaggttgagcaggcgcatcgcgctgtatttcgattcgccgtgggcgcgctcggcgtgggcgacgcggatctcgcaggtatgccgggcgaagccgttggccaggatcgggatgaaggtactgcgttcgcggcaggccagcatcgcttcgacgatgctgcgccggtaggcgcgcagcatgcagccgtagtcgtgcatggcgaccccggtggagcgctgcaccgccaggttcaccaggcgcgaaggccagcgccgccaggccgagtcctggcgctcggcgcggatgctgccgaccacgtcgtagccctgcgcggcgcgctccaccaggcgcgggatttcctccggcgggttctgcaggtcggcatcgagggtgatcaccaggtcgccacgggactgttcgaagccggcgaggatcgccgcgtgctggccgtagttgcggttgaggatcaccgccaccacggcgctgccgtcgcgttcggcggcggcctgcaagagttccgcggagcggtcgcggctgccgtcgtcgaccagcacgatctcgaaggcgcggcccagctccaggcaggcggcctcggtgcggcgcagcagttcgggcaggctggcttcctcgttgtagaccgggatcaccaccgagaccaggtcgatcggatagggcttcatcgacgtttctccaggatctcctcgatggcgcgggcgacgcgctcgatgtcgtcgtcgcgcatgtcggggaacagcgggatggagcacaggcgggccgagttccactcgctgttgggcaggctcaggcgcggctggcgctggcggtagtagtggtgcaggtgactggcgatgaaatggatgccgctaccgatgccgcgcaccttcagggcttccatgaaggcgtcgcggcccaggccgcaggcctcggcgtcgatgcgcaggatgaacaggtgccaggcgtggcgctgcttgtgcgcgggcaggccgagcggcgccagcggcaggccggcgaggcgctccaggtagcgttcggcgagggcctggcggcgcgcgttgagcgcgtccaggcgcttgagctggaccagcgcgagggcggcgttgaggtcggccaggttgtatttgaaaccgggctcgatcacttccgcctgcggcttgcgtccatggctcaggcggtcgtaggcatcgaccccgaggccgtggaacttgaggcggcggacccgttcggcgagggcactgtcgtcgctgacgaacatcgcgccttcggcgcaggtcaggttcttgatcgcgtggaaggaaaagatcgccgtgccgcgggagcctaccgggcgcccgcggtattcgctgccgaccgcgtgggcggcgtcctcgaccagggcgatgccgtggcgcccggcgaccgtgcgcaggccttcgagatccagggtggagccggcgtagtgaaccggcacgatggcgcgggtgcgcgggccgatggcggcttccactgcctgcgccgaacacatcagggtgtcgcggtcgacgtcgacgaacaccggggtggcgccgagcagggtgatgacgttggcggtggagacccaggtcagcgacggcgtgatcacttcgtcgccggggccgatgcccagcgccagcagggtgacgtgcagggcgccggtggccgaggatagcgccaccgcgtggcggcagccgaggcgttcggcgaagcgctgttcgagctcctggttcttcggcccggtggtgatccagccggaacgcaggacctgctccacggcggcgatttcgtcctcgccgatgcttggccgggagaatggcagaaagtccagtgacatgtaatgaagcctcggtactgggagggcggtacgaagaggttatttatatgtcgctgaatgctgcctgaacgtttgttaagactcgcttaacaacggctgaatgaagactgaacgaactcgaagaaactggaggataaagccggaagcctcgttttcaggggcttgcagggttggttggaatggatctcgggtgttttctgagtggcttttattaataacccgagtcctgtttctttaagggttcattaatacttgatgtccgctccccgtgaatattccggaaacttcatggaaacatggggagggccagggaaagtcaatcccgtaggttgtcggaaaaaaacaaccccctggcggatcgctccgccagggggccgggtcgacgcttcagcggctgccggcgaccacttgcagggccggttctgcggtgcgcccgtagacgtcttccaggcgctcgatgtcgtcctcgccgaggtagctgccggactgcacctcgatgatctccagcgggatcttgccggggttggccaggcggtgcacggaggcgatcgggatgtaggtcgactggttctcggtgagcaggaaggtcttgtcgtcgcaggtcacctgggcggtcccggaaaccacgatccagtgctcggcgcggtggtggtgcatctgcagcgagaggcgcgcgccgggcttcacggtgatgtgcttgacctggaagcggccgcccatgtccaccgagtcgtaggagccccacgggcggtagacctcgcagtggttctgggtctcgctacggccctgggcgtcgaggtccttgaccacgtgcttgacgtcctgcacccggtccttgtgggcgatcatcatggcgtccttggtttccaccaccacgatgtcctccaggccgatcaccgagaccagcttgccgttgccgtgcaccaggcagttgtggctgtcgtggaccagcacgtcgcccttggtgacgttgccgttggcgtccttggcgtgcacgtcccagatcgacgaccaactgccgacatcgttccagccggcggacagcggcaccacgcaggcgcgtgaggtcttctccatcaccgcgtagtcgatggagttgtccgggcagcattcgaaggtggcggcgtcgatgttcaccaggtcgccgtcgtgctggctgcgctccagggccagcaggcaggtgtcgtagatgtcggcgtcgtgcttcttcagttcttccaggtagcggctggcgcggaacaggaacatgccgctgttccagtagtagccgccggcggcgacgaactcgcgggcgcgggcttcgtcgggcttctcgacgaagctctgcacccggctgacgccttccggcagttgcgcatcggcgctcgcgcggatgtagccgtagccggtctcggggcggctggcgggaatgccgaagagcaccatctcgcccttttcggcggcgttggtggccagcgccagggcctgctggaaggcgcgctggtcctcgatcacgtggtcggcgggaaggatcagcagcagttcgtcgcggccctcggcgaccagtttcatcgcggcgatggccaccgccggcgccgtgttgcggccgaagggttcgaggaggatcgcctggctcgccaggttctgtgcctccagctgttcctggacgatgaagcggtgctccttgttgcacaccagcagcggtgcctgcatgccgtcgaaggccaggcgcttgatggtctgctggaacagggtgtcgtcgccggtgagggcgaggaactgcttggggtactgcttgcgggaaagaggccagagtcgcgagccgctgccaccggaaaggattactgggatcatgttgtttctccttgaagcgatgcgtctgtctagggatcccgccgcgcggcgggatatctcgttaccgggctccacggagccccgggtgacctctccagtgcgctccttctgcgggagcgctgacggttggtgcgccggtgtcgggccggtcttgttgtgtggaatgccgggaggggcgagcctctcccggtcggtctcagtccgccttcaccgggcgcttgacccagaccggcgcgagcttgccgccgctgccggtgacgtacaggcagaccacctcgccgcgggccagggtgactggcttcaggtcgctgaccttcttgctgccgtcgaacagcgccaggttcaccttcaccgggttgatctcgcggtcgccgtggctttgcgggccgacgtccttgaccacgtcggtcttgccgtcggcggtcttcagggtcagcttcgagccgctgaggttctgcacccgtaccagcgccttctgcttgttcttgaacggcggctcggccaccagctgcggcttgccgccgggctggctgaccagggtgtagtagctgtccgggtcgagcttgaccggcaggctctgctggccgacctgggcggtgtagctgccgggggggaggaacttgaagtcgctggaaccgagcggcgcgacgtcgttcaggctggtgctgccgaccgacacgtcgagttcgctgttgccggcgttgtaggcgcggacgaaggccgagcccttgggtgcctggggcccgtacagggcgccctcgtcggcctgcgcggcgaatgcggcgacgccgagggaaagtgcgcaggccaggcggttccaggtgtggcggcgggtcatcgggttcatgggtattcctccgttgcttcttcttcagcggggcgctcggccccgtgggtaaacagccttggctgtgttcgttcaatcgttgcggctggcggccaggcgctcatcgcggccgccgctggccttcagctgggcgacccagtcggcgtcgaactggctgaggtcgctggccatcggcaggtagcgctcgggaaactcccagaccagcagttgcggcgggtccttgcggaagccttcgtcctgcagcagttccagcatcggttcgagggggcccttgccttccttcgcgtaattgatcaggtcggcggacagcgcctgtttcagcgcgccctcgaagttccacctggggttggcgctgtagctggtgccgaccagcgccaggcgcggttgctggctatcgccgaagaggtcgtcgcccgcgccggactgctggccgcccggcagtgccggcgcggcttcggtggtgcgttgctgcaactgctccggacgcggcagcagttcgtcgaacagcgggtccagcggcaggaagctgagcaggtcgcccttgtgcgtgcgttcttcgccgacgcgggtgacgaagttctgcgccggcacatccagcaggtgcgtctcgcggatctccgcgccgaggcgctgggccacggtttccgcgccgagcggcgaccagtgggtgtcggtgcgcaggaacaccgcgccgttgtccttggcctggcgcaggctgccgagcaggtcgggactgtcgatgccggcggcgcgggcgcgggccaggaagtcctggtagaggctgtcgtgcagcgcggccggctgctcgcggccgatgtgctcgggatacaggcgggccttggccgggatcaccgcgagcaccagcttgacgccgcgccggttcagctcccgctgcacgccgcgtaccagtgcccagttgtcttccagttgctggccgctcggtgccggcttgaactcttcgtcggtgaacagccagccgtccttgccgatcaccacgccggggcggccttcgtggaacagcgtgtagtcgagtgcggcccagaggttggtgcccaggcgcttgatcgggaattccttgtcgtagtgggcttcgaaggcgtgcgccagcttgccgttgagcagtggcgtatcggccgcggcggagaagcccggcacgctcttcagcgaccatccggcgagccccagcagcagcccgccgaaggcggcgatataggcgtattgcagggggcgggaaatgctctgtgtcatggcgtgggcctcgctcagaactggaagtagaggaatggcgagtagctctgcgcggagagcttcagcaccgaggcggcgaacagcaggagcagcgccaggcgggtggccaggacgggcaactggctgagccagctcggctggtagaccagcgcgccgctcggcgagtaggcgatcgccgccgggtcgccggcggcctcgcgcggggcacgcggctgggcactggccgggccgtcggcggccacttcgtcgctgttcgccgcggccttgggcgccttggtctgcaatggctggttgtagaactggcgcaggccgaagaacgccagcaccaggtaggccaggaccagggtgccgacctgcaggccggtgaggctggcgcggttcagttcggagagctgccaggtgccgaagctgaacatggcttcgtacatgcgccaggcgacctgcaggttctcggcgcggaagatcacccagccgatcaccaccaggaggaaggtgaacgcccacttcaacgggttgagcacgcgcggcgcggcgttcaccccgagggcccgctcgatcgccagccacatgccgtgccaggcgccccagatgatgtaggtgaagttggcgccgtgccacaggccgccgaggagcatggtcaggaacaggttgcggtaggtctggaaggtgctgccgcggttgccgcccaggctgatgtagaggtagtcgcgcagccaggtcgacaggctgatgtgccagcgccgccagaactcggtgatcgactggctgatgtagggctggttgaagttctccatgaagcggaagcccatcatcaggccgaggccgatggccatgtcgctgtagccggagaagtcgaagtagagctgcgcggtgtaggccagggcgccgagccaggcgtcgccggtggtcgggttctgcagggcgaagcagtggtcggcgagggcggccagggtgtcggcgatgaacaccttcttgacgaagccctgcatgaagcgggtgcagccttcggcgaacttgtcgacagtgtgggtgcggtggttgaactggtcgaccaggtccttgaagcgcagcaccgggccggcgatcaggtgcgggaagatcgcgacgaaggcggcgaagtcgatcaggttgtgggtcgccggggtatcgccgcggtagacgtcgatgatgtagctgatcgactcgaaggtgtagaaggagatgccgatcggcagcaggatgtgggtcagcacgaacggctgcatgccgaacgaggtgatgatctcgttgaggctgtcgacgccgaagttggcgtacttgaagtagccgagcacgcagaggtcgaccaccacgccgaggatcagccagcgttgcgcggccctggtgcgtacgccggcggcgccgatgcgcaggccgatccagtagttgaagacggtgaccccggcgaacagcaggaggaagtccacccgccaccaggcgtagaacacgtagctggcgatcagcagcagcaggttccggtaacgttcgccgctcaggtagtacaggccgagaaagaccggcaggaacaggaacaggaacacgtttgaagaaaagaccatgccgtctctctctctagagcgtcaaccattcaggtcggccctgcctttccgcgccctggagcgctcgaggaaaggcgggacgacccgccgttttcctccccgtggtgttgcctaaggtgttgcgcccgcccgcgtctgtcgcgcatgggtcggggtgtggcgcctggtcggcgagcggggtagaggggcgcgtggcccccggcctgtgcgcccgcttcccgccacgccctcaacttcccccttcgcggctgaacacccgcgtcacttcgccgccgaggcggaaactgttgaacggctcgcggtccttcttcgcctcgagcatcttcggctcgcagcggtagagggcgcagtagggctccagccaggcgtacttgttgtcgaccttgaggtcggtcatgtcctggtcctcgccggtcttctcctcgaaggtttcctcgtcgtcgactcccttcatcacccgctcggccaggcgctgcagggcgccgtggttctcctggcgcaggtcgacgccgttgacctgggcgaacgcggcgatcatcgccagcggtggcagcgcatagttgtggtaggcgagggcgcgctggcggcgcttgagttcgttgggcaggaagccctgctcgtcgacctggttggcggcgaccttgaactcgctcaccgcccagtcgaagaggtcgcggcggttggtcaccaccgcggtggacatcaccgaccaggccgcccagtaggaatggttgttgatcttcttcagcggcaggccgctccagtcgcggactacctgggtgccgagccgggcgaaccagtcctcgatttcccggctctgctcggcgtgggccgcgagcggccgcgagctggagaacttcaggcgcatgtaggcgccggagaggctgcccagcgcccatttgcgcatggacttgccggtgtggttgaagtcgtcgctctgcagggcgccggcgcgggcccaggcgctcatccagttcagtgcgcaggccaggtcgccgtcgcggccgctgcgcatgtactgggtgaccagcttggtagcgccgcgctccatgtcggtgatgtccttgatctgcgagcggaaggtcttctccgccttgacgttgagggtcgcccgcgccgaatcggagccttcgtacttgctggtgaagaccaggctgccggtatacggcggcggcaccgcggggcagctgccggcgctgcccttgcgctcgccgaccgccgcgtagtagccgggcgggggtaccaggtcggcggcctggctgacttggctggcgagcaatgccgcggcgagggcaccgggcagggcgatacggatcaggtgggacgttttcatcgtttacctcccggccaccgactggctggccttggcgggcgccgcctggcagatgctggcctggacctccaggccctggggcatgtcctccggcgcttcgatttccagggaaaggaactgctggtcggcccagtcgctgtcgttgcgcagttggaagacgtagcggccgccggtatcgacggctttcgactgctcgatcttcaactgctcgcggcggccgttcatgtaccagatggtgttcttcaactcgtgtaccgaagggtcgctgtaggtcacgtcggcgacgtagctgccgctacggatcggtagcgcggcgctgttcagcagcacctcgttgcggccctggcgcagcttgaccttgcggctgagtacggtcttccggccggagcagccgttgtccaccagcggcatggcctggcggtagaagctcttctgcgccatgtcgtagtgggtggcgaattcccagatgaggatcttcggcgggttcttgtggaattcctcgctggtcatgtacgccagcagcgaactgtcgaagccgccgccggacaccgcgttgttgaggatgtcggcgccgctgaactcctccaggaagccggcgaagttgtaggccgggccgctgttggaggtgccgaccagggcgatctgcgggttgccgccgtcgccgaacagatcgccgctgtcgctggcgcccaccggctcggtctcgaagcggtcgacgtactgggtggcgtagctgttgccgcagagttgcgcggcggccttgtggaaggtgccgagcttggacagcaggccgacgcgcttgctttcgaactgcttcttcgggatctcctcgaagccgggcacctgcttcagcgtctcggccacgatcttcgcgctgcgccgggcgccatggggagtccagtggtggtcgcccttgaagtagtaggcgtgctcctccttctcgtcgaacagcggcgagaagtccggggtccagatgccggcctggcggaagcgggcgatggtcgccaggtagttcttcttcgccagctcgtagtcgaagccggccttttccgctgggctgagcttctcgcggttcaccaggccgcgggtcggctggtagaccaccaccagctcgatgcccttgcgcttgagttcgtcgcgcagtgcgcggagttcgcgccagccttcggcgctggtgccgaagtcggtacgcaggtcgtaggtggtgcggaacagccagtcgtcctgggcctgcaccaggtgggtgaagaagcccaggtacttggtgttgtagcgcgagtcgtcggcggcggccgggcacaggttgccggccggcagcgcctggtagctcggcgccgcgccggggtcggcggccagggctgcctgggccaggcagaggccggcggccagggcgctcaggcggaacagtcgggaagtgcgggttttcatgcgtctgggtcctcagtcctggagttcggcctggctttccacggggtcgatcagcaccgccttgtcctggcgcaccagcaggtcgaggatctggtcctgcttctcgccgagaacgccgggcaggctgatgccggaggatttggtcggggcgagcatcgccacccggtacagttcgaggctcagcggcgagtccaccgagagcgggccggagccgttgccggcgagcttgccgccgaccacgatcagcgagaccttggtgtcgaatgggtcgagggcgatgttgcggtcggtgttggtgaggtccttgatgtggccgtacacgccgatcagttggttgcccgccgcgaggttctcgtagaggcggatgttcacgctgttgcgcacgcggatgccgtggcggcggttggccaggacctggttgccccagagcaggttgtcgccgctctcgtagagggtgatgccgtcggaatggttgcgatagacctcgttgtaggccaccaggttgccctcgctgttacggtcgaggacgatcccggaaagcttgttctcgtagctgcggttgttgaagatgaagctgtcgttgacttcccgcgagacgatgatgccgtgcttcttcctggtcccgtggacggtgttgtcggcgatgatcaggcggtgcgaacggtcgtgcgggtcgatgccgtagacgatgttgtcgcggtaggtgttgcccttcaccaccaggtcgtcggcctcgtagcaatagaagccgtaccagctgtcgacgatggtcgagtcgatcacccagcccttggggcgcgggcgcttcatctgcttgtccatgcccgggctgtactgcgagatggagatgccgtaggccttggaggcgttgtagccgaagctggtgaaggtgctgttgctcaggtacacctcggcgccgccccaggagatcaggaacggacggaactcgttgggcgtcttgaaccaggccggctccttcttcgattcgctccagccggtgaccttgctgtcgcggacgaacagcatgccgtcgttgaccaggaacgcgccgcgctcctgggacaggcgcagttccttgacctgcttgtcgatgtcgagggtcgcgccctggctgaccacgatcggcaggcgggcgacgaacacccccggctcgacctgttccagcgcgctggcgggaagcttgccggcgagctgggcgaggttcacgtagccgccttcgatgaagatcgcctggggcatctggcgctggcgcttgacccattcggcgaggcggttgctgccaccggtgaactccttcagcggctgctgctggaccatgcgctgcacgctggcgcggccacccggcttgcgcacgatcttggcttccaccgcggcggcggtgtagccggagaggtcgggcagtttcggcgggtccaggtgcaacggttcggccggcgcggtggtcaccgtgtagttgccggtttccttcaggctctgggtcaggcccggctcgttgccggcctgcgccgggaccggctgcggtttctccaccggctgcgccgcccacgcctggccgtgcagcagcaccgcgccgagcactgccgcggccagcgggcgcaggcgcgggagccggcggcgggggatcgaaagggaaatgtcgggcatgtccggtttcctcgcggggctcagaagcgccagatgaagtcgacgaaggcgcggtgcatggtcgagtcggtgcccggcccgtaggcgtcgcccggcttgaacaggccgccgcggaagcggatcagcgccgagggctcgtcgacgtactggctcatcgaggccggcagcaggccttgcttgaagtacttggtcaccaccaggtcgagttcctggccgatgtccttctcgcccggttgcagggcggcgttgatgccgctggtaccgatgtcggagtcgtcgtcgacgcgccagaacttgtggtagaccaggctcgcgtcgtagtcctcgcgcagttgccaggagccgaacagggtggctgcctggaggttgctcagttcgccgcggaaggcttcgccgaagcggtgcacgcgcgagcgggtgccggtgaagttggagcgattgctctccagcccggtctgctggaactgctcctcgccgtccttgccaccgccgctgccgcgggcgtagccgacgccggccttccattgctcatcgatgttccagcgcaggccgaggtcgacgccgaaggcattgacgtcgccgctctgcttgccggtggcgatgcgccggtcgtcgaccgtggtggtggtcaggttgtcgcgatcgccggtcagccaggtggcgctggcccagtagttcagcggcatgctcgaacgatagttgtaggcatcgccggtagcctcgatgccgagccaggtgagctggccggtataggtcttgtcgaggttgtcgacttcctcgccggggcggcgcaggtggccgctgtcgtcggcgtggtggatgcgcacgccgatgcggtggtgcggcgcccactgggtggagatgtcgccgaacacatgggtgcggtccttgtcctccggagccagttcgtcgaggtcggtgcggtattcgctgaaacgctgggcgactccggcgtgggcgttgagcagggtggtctcgaagctccagttcagcgcctcgatgttggtgtcctgccactggccgctgtcttcccgcaggcgctggcggccgaagcgcaggtgctcgccggggtaggcggtgaggccggcgtagtcgacccagaattcgcgtgcggcgaggtagctcttgtccggctcgcgaccgtcgttgcggctgttgttgccgtcgtcggtgtccgattgcagggtgtcggtctcgatggtgtcggtggcggccaccgcctggcccatgaagtaggcgctccagtcgccccactggccgaaggcccagggccgcaggtcgataccgatgtcgttgagggtgccgccgggagcggtgccgaggtcgcgatcgttttccgattcgccggtgatcttcacgtccaggccgaagttcttcggtgcctcgccgctgccggcggcgaacgccggcgcgccgagcagcagggcgatggccagggacagggcgcgcggcgcgaaggacggccgcgggttgacggaacgggagctgttcataggctttctggctcttcttcgttgatcggcgagtcctggctctgcagcaggctgacggtggcctgccagttgttgccgcggctctgttgttcgcgcttgagcaattgctgcgcctggctgcgttcggccggcggcagttgcgcttcgatctgcccgagcaggtcgctggcctgcggtacctgctgctgcacggcgagctggccgaagacgtaggcgttgacccggttcggctggatgccgcggccctgcgaccagagctgggccagggccatgtcggcgctggcctggccggcgcgggcggcgaggatcaggtggtcgacggccttctgcggatagaccttgccgaggaagccgcggcggtagatctgccccaggtagtagttggcctggggttcgctggcggcggccttgagcaggtgccgctcggccttgcgcgggtcctgcggcgcccacttgccgtcgtagtagaggcgcccgaggagcagttcggcgcgtggctgggcggcgtcctgggcgttcttcaggtagccgagcatcttttccaggtcgccctggtcgggatagtcgtagagcagcttggccaggctgacccaggccgcggggtagctcggcgcgatctcttccagcagcgcctgggcggtctgcgggtcgggctggccgagttcgccgtcggcgagcaccccggccaccgagtcgacccgctcgccgggcacccggccggccttgtaggcggcgcgcagctgttcgagcaggaccttctgcttttccgcgttgccctgcatctggtagaccgtggccagttcgtaccagcacacatccatgcgccgcagccagcgctggcagacctgctcgatctcgcccaggtgctgggcgtaggtgccctgggtgcggtagaggatgatctgcgccaggtcggcctgcggcagtccgcgcgcgcgccactggtcgatgcgctgctgcgggtcgatttccggccaggactgcgggtactgcaggtagagcacgatgagcggcaccagggcactgtcctcgccctgttcgaaggcctggctgagcaggcgctcggcctcgcggtgctcggcgtcgctggcgccgggcttggccgccagccacttgccaaggcgcgcgcgggcccgcggcgaggtctgcgcggcctcgcggtagagcttttcggccttggcctgctgggcgctgtcgccgctggcgacctgcatgtcggcgaggccgacctgggcgtcggcgtaacccatcgcggccagggcctggtagttgctctgggcggtggcgaggtcgccgcgctccagggcctcctgggccaggcgctggtcgggcagtccggcgcagccggcggccagggcgatggccgaggccagcagcaggtgccgggacgccaggggcaggggagggaggatgggcatcttcatggtcgggtaccggtcagcgagcggtggccagggtcacggccttgttcagcagggtgcggccgggcaggccgccgatgctgacctcggccgggcggccggcgtactgggcgtcgagcggctggtcgggctggatctgcacgcggatttccgaggacaggtcgccgtccaccggcgcggtgttgacgatgcggccgctgcggttgacgccgtcgccggcgacctggaagttcacccgggtgcccggcgccagctcggcggcgttgcggtaggggaagcgcgcctcgatgctggccacgctgtcgcgcggggcgagggtgaagatcacctggcccttgttggcgtattgcccgtcggctaccagttgctggaccacgcggcagtcgcaggggctggtcagggtccctttcatctggtggccgaagagcttctcgatgttgcccgggttgagctgctcctcggtcaggttgcccttgagcatgtccagcaggttggccgagaaggtagcgatcggcgcgcctttggcgacttccgcgttgggcccgagaaggctctgcacggtgccctcgcggggcatggtgatctgctggttggggacgctgaccacgccggaatcggcatgggtgacgaagtacaggttgtacatctggttgaggatgaaggcgaaggcgctgactccgacgacgaagatcgcggtgctcagggtcaccgcccggacccggccgaagaagcccatcccgccgttgccgccgccctgcttgcgggccttggtgaagttctcgcgctggagggtgttgagcatgtcgccgacgccgatcacctcgccggccaggtaggaggtgatcaggtagcgcagggccgccacctcgcgcggcttgaggttctggaactcgcagccgacgcggcggctggcggggtccaccgagcgcacctggaactccacttcgagggaaaagctgatgctgtcgacctggaacagcagcttgcccttgtacaggtcgccgggctggatcggtgcgccgctcgcggtgaaggcgaagccgccggcggagagatccagcaggcgtgcgtcgacgccttcgcggttggcgccgatgtagcggatgcgcgccggcagcttgacccgggcgaactggcgctgggcttcggattcgtgcacgacgttgacgttgacggctgtattcatggtgtcgggtcctgttcggtccaatctgggtcgatttgcgcgcgggccgcggccctggcgttgtccgtagtcgattcggtggtcatacgatggtcagcagcacggcgacgaagatgctggcggcagagaaggtcatggcccgcgacgaccaggcgttgaaccagcgctggaagctggccaggccgcgctccagcttggtcggctggcgggtccaggactgccggtcgaggcggaagaacacgtagatcttcaccagcgcgccgacgatctggttgtaatagaggatcagcggataggccgggccgatgcggtgcccggagagcgagaggagcagggtcagcaccaggcgggtgaggccgatccagagcaggtacaccagcaggaaggcgatgctgtacttgaggctggcgaggatcgccaccaccaggccgagcaggctggtccacatcgagacgcgctggtcgaacagcaccagcatggtgaaccagcccaggcgccgcgcgccgagcttgagcgcgcgcgagttctgccgcaggttgttgccgtaccagcggtacatcagcttgcgactggccttgatgaagctcttctccggcgggtgctcgaccgtgttgatcgccgcgtcgggcacgtagaaggtgtcgtagcccaggcgcatcaggctgaaccagctggacttgtcgtcgccggtgaggaacttgaagcgacccaggcgccagtgctccaggtggtcgttctcgacgtcggtgatgaactcggggttggtcaccacccgggcgcggaacaccgacatccgtccggtcatggtcagcacgcgcttggacagggccatcgagcacatgttgatgtggcgctgggcgaagcgcagcttgtgccactcgctcatcacgtagccgccctgcacttcgcagaattcattggtggtgaggccgccgacgttggggaagagcttgaaccagggcacggtcttcttcaccacgccgtggtcgagcacggtgtcgccgtcgatcaccgcgaccaccgcgtcgtcgtccggcaggtgccgggaaatcgcgcggaagccataggccaggccgtcgcgcttgccggtgccgggaatccgcacgaagtcgaggctgacccggtccggcgggttcatcttctcccacagagaacggaccaggacctcgtcggacatctcgacgatggagcagaccacggtggtcgggtagccgctgtcgatggcttcgcggatcaccgagcgatagaccatggcagtggtcagggcgtcgatgcggaaactggtgaccatcaggaacacgtgcgacgggtcggccgcgctgcccaactggcgcacgcgccggcggtagtacgggtagaccacgtggaggaacagcatgccgcgcaggaagtgcacgccgcccatggagtagcgccagatgccgacggcgccgataagcaggatgaaatccttggagtcggcgtcgaacacggtcttcggcactgccagcgcgagcaccatcagcaggctgaggaacaccagccagccggtggcttcggcgaggccacgtttgtaagtttccatcatcagttccatcgggctggggaccttggcctcgacgccggcgtgcgcttgttgttgttatggcgcacgccgcggagacggccttcggtccgagggcgataaagaggttctttaccggctcacggggccaggggggcggcccgctaccagcagatgccctcggcctgggcagtggtggtgtgcggcatgaagcccaccaggtcgaccagcttcttgccgctcggggtcttgttcaccaggtcgacgaacagctcgtcgccattgcccagcaccagcacatcggaactcgccaccacttcgtcgaggtcggagaccagcagcgaggagacgtgcgggatcttcgactcgatgtattccttgttggccccgtggacacgcgcgtattcgacgttgcggtcgaagatgcgcaactcgtagcccttgccgatgagcatctcggccagctccaccagcgggctttcgcgcaaatcgtcggtgccggccttgaacgacaggccgagcaggccgaccttgcgggtgtcgtggctggtgatgagatcgaaggccttctgcacctggttggagttgctgcgcatcaacgaaccgagcatcgggtgctcgacgtccagctggctggcgcgataggtgagggcgcgtacatccttgggcaggcaggagccgccgaaggcgaagccgggacgcatgtagtagcgcgacaggttgagcttgtggtcctggcagatcacgtccatcacctcgcggccgtcgacgccgaccgccttggcgatgttgccgatctcgttggcgaaggtgaccttggcggcgtgccagacgttgcaggtgtacttgatcatctcggcgacctcgacggtcttgcggatgatcggcgcgtccagctcgcggtagatttcctcgagaaggtcgccggtctgcttgtccagttcgccgatcacggtcatcggcgggaagtcgtagtccttgatcgcggtgctctcgcggaggaattcggggttggtgccgacgccgaagtcgaccccggccttcttgcccgagcagtcctcgatcagcgggatcaccacgttgttgacggtgcccggcagtacggtgctgcgcaccaccacggtgtggcgttcggacttctcgcggatggcgaagccgatctcgcggcagacggtctcgatgtagcccaggtccaggtcgccgttcttcttgctcggcgtgccgacgcagatgaacgatacgtcggagtccagcacagccttcttgaagtcggtggtgcccgacagccgtccggtctgccggccttgctgcaacaacgcttccaggcccggttcgacgatgggcgacttgccctggttgatcaggtcgatcttggtgctggagacatccacaccaatgacttcatgaccgcgtgccgacaggcagccagcacatactgcaccgacatagcccaaaccaaagatgctgattcgcatcgcattcacctcgattgtttgtcgcgccgttaatgaggtggccgtatggccacttccctatctggcgagccgttactacgagccccgatccagagcccttgatccgccttcaggcagtttcgaatagagtgcttagttgttcggcactctaatggggcaagttataagttcatgccctttaatgtttcaggtgggtttcaataacggtgcataacccgaccttggatgcttagttttagttcggtccatagaattcaagtttctaaaggcctttaatttcaacaggttgagtttgtccctcggagcggaatccgattattcgagacggtttcaagttgctctgcccataactatcgataggcatcgcggtgataggatgttttctctgcgagggaagttccggccgtttgtcccgctcgcgaaatatttggaaatatccgtttgatatcacttgataccaacttgatggcctttccgttaaatgcctgccaatggccactagttgcagaatgcatggcggctgaaagttccgcgtcaccggaatgaaacagaagccgcttttaccgccttaagcaaaccttaaggattccttaatcttcgacccatgcactttgcaatcgtaatttgcatgtaatggcgggaggctggtaatggccaatggattacgccggagatggcatttccgccttgaattggggaaaagtctgtgggctgggcgtgaaaaaatgtgatgcagttccgaatgacttgcagacgaacggttgagtaggcctattcgccacaagggcttttccggggaaaaaggcgacgcagcaggggtgtcggagggacgaacggtagcgccaggaggcgtcggcgtgccgaaagaggagcggcccgccaggacggcgggccggggagatcagtcttgcggggcgtccctgaggaataccagctgatccgggccggattgctcggcgctgaagtaatagccgtgggcattgaagtccttcagcccggccgggtcgcgcaggcgctcgcggatcacgtagcgagccatcatgccgcgagccttcttggcgtagaagctgatgatcttgtactggccgttcttcaggtccttgaactcggtgtcgatgacccgcgcttgcagcgccttgcgcttcaccgcgccgaagtactcgttggaggccaggttgagcagcacgtcgtcgccctgggcggccagcgcttcgttcagccactggctgatacgctcgccccagaaggcgtagagatccttgccacgggcgttggccaggcgggtgcccatttccagtcgatagggctgcatgaggtcgagcgggcgcagcacgccgtagagaccggagagcatgcgcaggtgatcctgggcgaaggcgaaatcgtcctcgccgaagtcttccgcgttgaggccggtgtagacatcgcccttgaaggcgagcaacgcctgcttggcgttctccggggtgaactccggatgccaactggcgtagcgagcggcattcaggccggcgagcttgtcggaaagcttcatcagttcgctgatctgcagtggcgtgagctggcgcagttgctggatcagttcctgggcgtggtccaggtattgcggctgggtgaagcggtgggtgaccggcggggtctcgtagtccagggtcttggcgggggaaatcaccatcagcatcgttcaggctcctcgaatcgtcgggcgattgtaggggctggagacgtccggctccacctatgcggtcgatagggaaaggcgccgccgaccgaacggcgccgaggtatcaggcctggacgggagcgaggtgcgcggcgacgctgccccgggcggcgaacaccaccaggtggtcggcggcgacgcggataccgacgtcatcgcccggctggtggtcggcatggctggggaagatcgattccagctgggtaccggtgggcaattgcaggcggtacagggtggcggcgccgaggaaggtcttgccgacgatccgcgccttcagctcgccctgcggcgcgtgcaccaggtcgtccgggcgcagcaggacgtctaccgcgctgccggaaggcaggctgtaggcgcgattgccgcggatcacgccgagttcggtctgcaccgtatcggggctgagcaactggccgcgaatgaagtagccctggccgacgaagctggcgacgaagggcgtcagcggctcgtggtagaggttgtagggagtgtcccactgttccaggtgaccttccttgaacacgccgatgtggtcgcagacggcgaaggcttcttcctggtcgtgggtcaccaggatcgcgctggtgccgcgtgccttgaggatctcgcgaacctcctggctgaggctgcggcgcagttccacgtcgaggttggagaagggttcgtcgagcagcagcaacagcggttcgggcgccagcgcgcgggccagggccacccgttgttgctggccgccggagagttcgtgggggtggcgcgcggcgaggtggtcgagcttgaccagctccagaagctcgcgcaccaggcgttcgcgttgtggatgcttgcggatgccgaagccgacgttgtcggccacgctgagatgggggaacagcgcgtagtcctggaacaccatgccgatccggcgtttctccggcgccagggtgaagccgggacgcgagatgacttcgccgcccagttcgatctgcccggccagcaccggctcgaagccggcgatggcgcgcagggtggtggtcttgccgcatcccgaaggacccagcaggcagccgatgtctccggcattgaggtgcaggtcgaggtcctgcacgactttctgcgaggcgtagccgcaggcgagatctttcaggttcagcagcaggtcgtggctcatgggctcaggcgtaatgggcgtgttcgatcagcaattcgaggagggccttctgcgcgtgcagacggttctctgcctggtcccaggctaccgagcgcgggtcgtccagcaactcttcgctgatttcctcgccgcggtgggccggcaggcagtgcatgaatagtacatcgtcggcggctccatcgagcaacgcggcgttcacctggtagggacggaacagggcgatgcgcgcggcggcttcgtcttcctggcccatcgaggcccacacgtcggtgctcaccaggtgcgcgccggccaccgcttcgcgcgggtcgcggacgacgcgcaggcggtcgccggcaagggcgacgaactcggccttcggctcgtagccctcggggcaggccacgcgcagctggaagtcgaacttcagcgccgcttctatatagctgttgcacatgttgttgccgtcgccgatccaggccacggtcttgccctggatgctgccgcggtgctcgtggaaggtctgcatgtcggcgagcaactggcaggggtgcaggtcgtcggacaggccgttgatcaccggcaccttcgagtgcgcggcgaattccgtcagggtggcgtgggcgaaggtgcggatcatcacgccgtcgagcatccgcgacatgacccgggcgctgtcgccgatcggctcgccgcggccgagctgggtgtcgcgcggggagaggaagatcgcctggccgccgagctggatcatcccggcttcgaaggacaggcgggtacgggtcgaagccttctcgaagaccatgcccaggacccggctcttcagcggctcgtagagcacgcctcggttgcgcaggtccttcagctcgctgccgcggcggatcagaccgatcagctcttcggggctgtaatccataaacgagagaaagtgccgtacgctcatcgctgactaccttttatttttactgctggccgaggcactggccggctttcgcgagagaaaacgggactggacctgcggcgggaccgcaacgtgcgggaaaataggggaaggcgcgatcttataaggaaatgtcgcggaaacacaaggaggggcttggaaggcgcgggttacggggtttttcccgggtcttcgcggttgtcccgccgccaaagtcccgcctcgtcgatctatcggttgggcggggcgacgctttatgctgtgtgcgcccgaatgccttcatggaggaggcgggtttcggaccagggaggtcgaacatgcccacgggagaaacactcgccgccgcgccgccggcacggccattgcgccaatcgcggctgggcggcctgtcgctgttcctcgccctggccggggtcgccatcgcgctggcggtgatggcgctggcgctcggcgagcggatcgacctcagcgacgagaaccatctgctcggcctgttcgccgccgtgctggcggtcttcgcggtatcgacctgcggcctggtgctgggcctggccggcctgttcaggcgcagccgcaagcgtcacctggccctggccggcatcgtcctcaacctgtcgtgcctgctctggggctggcatgcgctgagcacggcggcggccgcgatcctgatggtcctggggcaaaccgggttgtcgttcctcagcgccctggcggtgctgttcggcatgatcttcttccgccaggcctgacccgttcagcgactgtgcgcaggcagcctgggcgcccgccgttcggccgctcgttcatcggattgccggattgcggccattcgtcgcggatttgcagggggaggggctcagccggggaaggagggtgcgagaggagcaaaaggtgagccccggaggtgcggatctccggggctcgtgcggcacggtggtgcgggcaccgggtcgcgatcagcgctggaagggatagtacagcgctggatggacagtatagcgctatgcatttcgcatgaatcctttagttaggtctttttctcatatttgcagcggtttcgtgaccgagggcaatgaagtggctttttccccttgccgcccgccggaacccatccaacggctggcatgccctcgtaaccgaagtcagaaacgccagtcgacggccagtccgacgccatggtccttctcgcggctgcccagcaggccgttgtagcccagccgcacgctcacttcgcgattcaccgcgaggctggcgtcgacgccgagcagcgcggcgtcgcgggacagggccacgctttccacgctgaatggctggctgccgctggcgaacgccaggtggcgttgcggggtggtgtcgctcaggttgtggcgccagccgagggtgccggagagcgccaggcggcgtccggcatccagctcgaaatgccgtttcgcgcgcaggcccagggtggtgaaggcggcgtccaggttgtcgtcgccaccctccagggccgcggcgctaccgcgttcgcggaagtcatcgctggcgacgtgcacgtaggccagcccggcgaagggttccagctccaggctgcgccagcccagcgcgtaggcggcctcggcgaacaactggctgctctgtgcgtcgagcttggccttctgcttgccggccacggcgccgtattgcaggtcgcgcttgacctcggcgcggtgccaggcgtgcgctgcgccgaggctcaggcgccattgctgcaattgccgaccgaggtaggcgccgaggtggtagctgtcgatgctggcggaggattgcaggctgctgtccatgttcagcgagctgttgctgtagccggccaccaggccgaggcgcgtgtcgctggcgacctggctgtcgacgccgagcaggaagccgccgaccgaatgccggtagccttcgctaccgtggctgccatcggcgctcttgccccaggagccgagcgccttgaaccagccttcgggagcctccccgccggcctcgccgtcgctggtctggcgcaggcgttcgccgacgctgtcgcgcagatagcggctgtcgttgagcaacaggccggcgagcgccgggtagatttccccggacaattgctggaaggcccgttgggcggttgcggcgttttccgacaggagcaggctttcgtagaccgggttgccggcgccgagcgtttccacggccccagcgaccgccgcctggttgggcgtctgcgcgacgctggcgagggtcgtgccgttgcgtccgatatccaggcggatggcgttggccgcgtagtccagggtgccgccgaggaacaggtagttcggcaataccgcgtcgaagcgcccgtcgatgccgccggcggcgtcgaggatgtcgtagcggcggccgaccaggctctcgacctgggactggctgagcaggtcggggctgttttccatggccagggtgacgttgccgcccgcgatgctcgccttgccgctggcgacgatccggtcgctggcgctttccgaaagctccaccgcgtaggtcgagccggattcgaagcgcaggtccccggcgacctccagggtgccgatggagttgcccgcggccaccgtgccgccggagcgcgccagcaggccgccgatcctgccgctgccgccgagggtgccgccggcattgacttcgacggcggacagcagcgaaccgtcgacgctgagcagcccgccatcgaccagggtcggcccgcgataggtgctgtcgccgctcaggaccaggctgccggcaccggccttgaccaggctgccctggtactggcgctgggcggcggcctggtcgcgggccatgccgatggcatagtcggtgcgttcctgctggctggcaccggccggcaagccgttttcccagcccttgtccttcagcgtccgctgccaggccgcgtgctcggcggcgtcctcggcctggcgctggagcagggcgctatcggaaatcgggttgctccattcgtcgcgcaggccggccgggaggttggcctcgaagcggccgagcaattgtccaggcccatgcatcgcccgaccgagatccggcacgccccagccgacggtgtcggtgggggcgccggtcggcgtgccgtcgagctgggtggcggtggtcagcagaacctgcagcgcctgctcgttgttcaggtacggatagcgctgcatgaccagggccagcgcgccggtggcgtggggcgcggccatcgaggtaccggacttgttggcgtagccgccgccgggcatggtgctgttgatcaggcggccgggcgtggtgatgcaccagtacttggcgatgccgcagcggttgtagcgctggccgttctgttggtcgaggccggacacggccagccagtggccttccaggtccggctggaagtagggcagggcggagcgcacgctggcgttggcgtagccgctgttgccggcgctgaagacgttgatcacgccctggcgggagacgccggcggcggcgtccagccaggtggagcgcccgtagtgctgggcataggcggcgtgcaggccgtcgagggtctcgtagctgacgtccttgggctggctgccccaactgttgttgatcgcccgcaccccggcgtcggccagcgcctggtaggcggccttgaaatagttcgggtcgggcgtcgggccgaacaggaagctgtcgttctggttggtgttggcgacatatacctgtgccgcgtaggccaccccgtgcatgccgacgccgtcgcgcgaggcgccgagggtgccgccgacgtgggtaccgtgggagtcgttgttgccgttcatcgcgccgctgacgctgaacggcgtgccgtcgacataggtgccgctggccgtcaccggctggtagcgcgaggcgggagtatccggatggctcgggtcgaaaccggagtccatctcgccgatcttcacgccctggccgtcgatgccggcggcataggcctggtcggcccgcatccgttccaggccccagtcctgctggtattcggcggagcgccaactggccggatcgccgggccgaccggcttcgacataggcggccgtggccggctgtgcgatccaggcgcccagcagcagggcggctgacaacgaggtggggcgagggcggaaggagtggtcgtcggtcatgcggtctccacgctttattggtcttgtcggacaggggtggactcgaagagacaaggtttagcaccggctttcgccgcgccggaattcccaggtggatagttgacagccggacaaacggcacgcctcccctctaccgcgcccatcggccagcctgatgcctggcgattcagccgactgacgctgctggcgcggcggcggaaggcgccgcatagtgccgattcgacgactagaccggtcgtctggtcctcgcgtacgcgccgggccgcgacggccggcgacgacaatgaagaggcgagccatgagcaagaccctccactaccgtgcgtgccatctctgcgaggccatctgcgggctcgccatcgagaccgagagcgacgagggcggcgtgccgcggatccgctcgatcaagggcgacccgcaggacagcttcagccgcggccatgtctgtcccaaggcggtggccctgcaggacatccaggacgaccccgaccgcctgcgccagccgttgcgccgggtcggcagcgagtggcagccgatcggctgggacgaggccttcgcgctggtggccagccgcctcggcgagatccgcgagcgccatggcaacgatgcggtggcggtctaccagggcaatccgagcgtgcacaactacggcctgatgacccatagcaactacttcctcggcctgctgaaaacgcgcaaccgcttctccgcgacttccgtcgaccagttgccgcatcacctggtcagccagcagatgtacggccatggtttgttgatcccgatccccgacatcgaccacaccgacttcatgctggtgctcggcggcaacccgctggcgtccaacggcagcatcatgaccgtgccggacgtggagaagcgcctgaaggcgctgaaggcacgcggcggccggttggtggtggtcgatccccggcgcagcgagaccgcggctatcgccgaccggcacctgttcattcgtcccggccaggatgcggcgctgttgctcgggatactcaacaccctgttcgaggagaacctcggtcgccccacgccgctgccggtcgacgggctggagcgggtgcgcgaggcggtcgcggccttcgacgccgagtccatgagcgcgcgctgtggcgtgccggccgaaagcattcgccaactggcgcgggatttcgccgccgccgaacgggcggtctgctatggccggatgggcgtttccacccaggccttcggcacgctctgccagtggctggtgcaactgatcaacctggtcaccggcaacctcgaccgggtcggtggcgcgctgtgcacctcgccggccctggacctggtggcgagtacctcgggtggccacttcggccgttggcgcagccgcgtctcggggctgccggaatatggcggcgaactgccggtggcggcattggcggaagaaatcctcggtgaaggcgaggggcaggtgcgcgcgctggtcacggtagccggcaacccggtgctgtccacgcccaacgggaggcggctcgaacaggccctggacggcctggagttcatgctcagcatcgacctctacatcaacgagacgacccgctacgccgatctcatcctgccgcccaccgcgccgctggagcacgatcactacgacaccaccttcaacgtcttcgccgttcgtaacgtgacccgtttcaacgaggccgtgctgccgcgtcccgagggtgcgctgcacgactgggagatcttcgtcggcctggcgcgggccttcgccgcgcgcaacggcctggagctgaaaccgaccctggagccgcagcagatgatcgacctcggcctgcgcgctggcgcctacggcgaccgttccgagcacaggctgagcctggccactctgcgcgaacatccccacggcatcgacctcgggccgctgcggccgaacctggcgccgcgcctgaagaccgccgaccagcgcatccaggccgcgccgccgctgttcgtcgacgacctgcaacgcttcgccgcacagccgctgcctgcgtccgaccagttgctgctgatcggacgacgccacgtgcgcagcaacaattcctggatgcacaactaccatcgcctggtgaagggcaagccgcgtcatcagttgctgatgcacccgcgggacctggagggtcgcggcctggtcgacgggcaacgggtgcgggtgcgctcgcgggtcggcagcgtggaggtggaggtggcggcgagcagcgagatgatgcccggggtggtcagcctgccgcacggctggggccacgcgcggcccggcgtgcaactggcgatcgcccgcgcccaggccggcgtcagcgccaacgacctgaccgacgagcgtcatctcgacctgctgtcgggtaacgccgcgctcaacggcctgccggtggaggtggaagcggcctgagcgggtcgacggaacgcgagagtaaagccgagcgtcgcgctaggctttccgatacaataccggtcattatttgccgagttaccgtgtcgaaacgttcctgttgaggtaagccatggacatcatcgaaaccattaaagagcagatcgccaacaaccccatcctgctgtacatgaagggttcgccgaacgccccgcagtgcggtttctcctcgcgcgcggcccaggtgctgatggcctgtggcgagaagttcgcctacgtcgacatcctgcagaacccggaaatccgcgccaacctgccgaagtacgcgaactggccgaccttcccgcagctgtgggtcaatggcgaactggtcggcggcagcgacatcctcgccgagatgttcgagaagggcgaactgcagaccctggtcaaggacgcggcggccaaagccaacgcctgatccgcgcatccgacgaagagccccgccttgtgcggggtttcttttttgtccggagaaaccagcaaggaaaccgggagcctccatgtcggaagtcaatcctcgccagggtcgcctggcttgcatctatttcttcgccatggccgggctggtcatcggcaacctgatgggacgcatcccggcgctcaaggagcagacccagctggacgagcgcgcgctcggccaggccctgctcggcgttgggggcggcgcgctcacggcgttcccgttgagcggtttcctggtccagcgcatcggcagccgcagcgtagtgatcggcggttgcctgatcatgctgctggtgtttccgctgctcggcctgagccagggctggtggcaactggcgttggccttctacgtgctgggcgtgagcttcgccgggatggacgtggcgatgaacatccaggcggtggatgtcgagcgcctgctcggcaagccctgcatgtccatgctgcatggcatgtacagcctcggttgcctggtcggtgcgttgagcgccgcggccctggccggactgacgccgttctggcacttcctcattctcaccgcactcggcctgctgagcctgccattcttcgtacgcgcgttgcttccgccggacccgagcaaggcgggcgcgcgcaagggcggcggcttcaccttgccgccgcgggccttgctcggcctgggcctgctgattctctgcgcgttcgtttccgagggcggcgtggctgactggagcgcgctgttcctgcacagcgttctggatgcttccgagcgggtggcggcgctgggcttcgcggcgttttccgcggcgatggtggtggggcggctgttcggcgaccgcctgcgcggacgcatcgacgatgcgccgttgctgcgcggcctgggttcgctggccacgctgggcatgctggtggcgctgttcagcccctggccggcgctgagcatcgccggtttcggggtggttggcctgggactgtcggtgatggtgccgatcgtgatcagcgctgctggcaaccagtcgggcatcgatccggtgatcggggtcgccgccgtctctaccgtggggtatggcggactgctgatgggaccgccgctgatcggcctgctggcccacgagatcggcctgcgctgggcattgctggtactggtcggtctttgcctgttgctggccctgcgcgccgatctggtccggcgcaggccgcgcagcgcctgaggctttctggcgggcaagaaaaaagcgccggcggggcaggccgccggcgcttcgtcgtggttcccgatcagtcgtcttcgtgcatgtgcgactgcaggtagttctccaggccgactttctggatcaggcccaactgggtttccaagtagtcgatgtgctcttcttccgactccaggatgtccttcagcaggtcgcggctgacatagtcgtgcacctgctcgcaatgcacgatggcttcgcgcaggtccttggtcgccttcagctccaggttcaggtcgcactgcagcatttcctgggtgttctcgccgatcagcagcttgccgaggtcctgcaggttgggcaggccttcgaggaacaggatgcgctcgatgagcttgtcggcatgcttcatctcgtcgatcgactcgtggtactcgtgggcgccgaggcgcttcaggccccagtcgttccacatgcgcgagtggaggaagtactggttgatcgcgatcagctcgttgccgaggatcttgttgaggtgctggatgactttcttgtcgcctttcatgccgaatcctgccgtcgtagtgggtgtgattcgccaagtttggccgcgacgaagcagggtgtcaaacctaagttattgaaatataagggaaaaagaatatgaatacgaatgttttctttccgcgttctgccgctaagtcattgaattgaaggcataaaaaaaccgggcgccaggcccggttcttctgaaagagggataaaaaatatttttcaggcagcgacgaacgccgtagtcccgaacgccggtaccggctgggcactctgcaggtcgttgagggtttcgcgtaccacctgcttggccaggcatgcgcacttgccgcactgggtaccgacgccggtggcttcgcgaacctcacgatagctgcagcagccttcgtagatggcatcgcggatctggttgtcggtaacaccttggcagaggcagacgtacatggcgatctggctactgggaagttgagttggaaaagatactaataataatgagaatgattgtcaaagttccctggagcgttttagtcgggtttttttcgccccccgacaaatggctttgtcggacaaagacttagcgccggctggggcggggtgtatgatggttgtttcccggggaacggcgcccctgccatcgaggcttcacgaggagccggcaggctgcggtgccgtccttcaaccttccgcttaaaggagacatggaatgagcgtactcgtaggtaagaaagcgcctgacttcaacgttgccgcggtactgggcaatggcgagatcgtcgagagcttcaccctgtccgaggccatcaagggcaagtacggcctggtgttcttctatccgctggacttcaccttcgtctgcccgtccgagctgatcgccctggaccaccgcatcccggaattccaggcgcgcaacgtcgaggtgatcggcgtttccatcgactcccacttcacccacaacgcctggcgcaacaccccggtggacaagggcggcatcggtgccgtcaagtacaccctggcggccgacaccaagcacgagatcgccaaggcctatgacgtcgagtccgacggtggcgtggccttccgtggcgcgttcctgatcgacaaggaaggcgttgtgcgctcgcagatcgtcaacgacctgccactgggccgcaacatggacgagctgctgcgtctggtcgatgccctgcagttccatgaggagcacggcgaagtctgcccggccaactggaagaagggcgacaagggcatgaccgcatcgcccgaaggcgtggccaagtacctggccgagaacgccagcaagctgtaagaagagcctgcttcgcgcgttggaaaaagccccgcttcggcggggctttttcatgggttcgcggaggccggcagccccatcccaggtcacgcgcctcgctccgaagagggggagattgcctgaccggtcgcgtaggacggataacgtcctggcattatccgcctaagtgggccgaggctcagtcgtcgtcatccatccagccgcccatttccttccagcggttgacgatgccgcagaacagctcggcggtcttctcggtgtcgtagcgtgccgagtgcgcctcgcggttgtcgaactccatgccggcggcctggcaggccttggccaggaccgtctggccgtaggcgaggccagccagggtggcggtgtcgaagctggagaagggatggaacggattgcgcttgatcccggtacgcgccacggcggcattgaggaaaccgaggtcgaagctgctgttgtggccgaccaggatcgcccgcttgcagccattggccttcagcgccttgcggatgccgcggaagatctcggtgagtgccgcttcctcctgcaccgccatgcgcagcgggtggtcaagcttgatgccggtgaattccagcgcggccggctcgatgttggcgccttcgaagggctcgatgcggaagaagtaggtgtgttccgggaacaggaagcctttctcgtccatgccgacagtggtcgcggcgatttccagcagcgcgtcggtggccgagttgaagccgccggtctcgacgtccaccactaccggcaggtagccgcggaagcggcgcgccatcggatggcgcgggccgctggggaggctgccgtcgaattcgtcgtcgaagttgtcttcgctcatgccccggcctccagcagtttccagcggagtgtctcgccggcgcgcagcggcaccacgtcgaagtcgccgaaggggaggctggcgggcgcctgccattcctcgcggaccagggtgatccggtcggtgttgcgcggcaggccatagaagtccgggccgtgcaggctggcgaagccttccagcttgtccagcgcattgcgctgttcgaaggcctcggcatacagctcgatggcggcgtaggcgctgtagcagccggcgcaaccgcaggcggcttccttggcgtggcgggcatgcggcgccgagtcggtgccgaggaagaatttcggattgccgctcaccgcggcgtccagcagggcttcctggtgggtgttgcgcttgaggatcggcaggcaatagaagtgcggacggataccgccgaccagcatgtggttgcggttgtacagcaggtgatgggcggtaatggtcgcgccgacgttggccggggcttcccggacgaactgggcggcgtcgccggtggtgatgtgctcgaagaccactttcagggtcgggaagcgctcgaccacccggcgcaggtgctcgtcgatgaactgcttctcacgatcgaatacgtcgacctcggcgcgggtcacctcgccatgcaccagcagcggcatgccgacctcggccatcgcctcgagcgcttcgaagatattgtcgatgcgggtcacgccagagtccgagttggtggtggcgcctgccggatagagcttggcggcatgcacgaagccgctggccttggcggtacggatttcctcggcgctggtgcggtcggtgaggtacagcaccatcagcggctcgaagcggctggcggcggggcgggcggcgaggatgcgctgccggtaggcgtcggcttcggcggcgttgcgcaccggcggcaccaggttcggcatgacgatggcgcggccgaaggtgcgggcggcgtcgccgacggtattggccagcgcggcaccgtcacgcaggtgaatgtgccagtcgtcggggcgcaggagggtgagacggtcggacatggggcttccaggacgggatttcgtggggggaaatgctaccggaaaagggggggcggggcactcgctatcaagttttgtccgggccgtccgatacatccttcgtatttggacgctttcccggagcccgccgtcgtgcagccgcgccttcttctattgcctttcctgctcagcagcctgccggcgctggcggtgaccttccagacgcggctggagagtgtcgagtggaaggtcgaaggcgaccagttcgaatgccgcctgtcgcagccggtggcgaatttcggagtcggcgagttcgtccggcgtgccggcgagcaggcgaccttccgcctgaagcccgaggcccagtggctggggcgcgggtcggcgaccctgctggctgccgcgccgccctggcgaccggggcagggcgacatcaaccttggccaggtcagcatcggtagcggcgaggtgccgttcaacagcagccagcaacaggccggtcggttgctcaccggcctgctcgaggggcgcagcccgctggtccgccatcgcacctggcagggcgatcgcctggaggtgcgcctgctgccggcgcgcttcgccagcgtctacagccagtaccaggcctgcatcgccaagctgctgccggtgaacttcgaccaggtcaagctggcccaggtcggcttccccgacggcggcacggcgctgaacgacgtggcgcgagccaagctggacatcatcctgcaactgctcaaggccgatccgagcatcaaccggatcgaactcgacgggcactccgacaacagcggcaaccgcctgaccaaccgcgacctgtcgcgccgccgcgcgctggcggtgcaggagtacctgaagaacaacggggtgccggaaagccagatcaacgtgcgcttctacggcgagcgctacccgctggtggccaacaacagcgccgccaaccgtgcgcgcaaccgccgggtcaccgtgcacctgtcgcgcgaggcggtggtcgagccggcgacggaagcgccgaaggccgaggacaagccggcgccgcccgcggcagaacctgccgcaccgaagcctccggccgcctcgcttcagggaaaacccacggtttgagtcgcgcaaacgatagaatctgtcgcttttgcgtctaaagctgtcgcccctctgtaatttcccgaatgccctgcgtagaattgtcgcttttcgtgacgacccccgtggagtgatggcatggcggatgtgaagaaggtagtcctggcgtattccggcggcctggatacctcggtaattctgaagtggttgcaagatacctataactgcgaagtggtgaccttcaccgccgacctcggccagggcgaggaagtcgaaccggctcgcgccaaggcccgcgcgatgggcgtcaaggaaatctacatcgacgacctgcgcgaagaattcgtccgcgacttcgtctacccgatgttccgcgccaacaccgtctacgaaggcgagtacctgctgggcacctccatcgctcgtccgctgatcgccaagcgcctgatcgagatcgccaacgagaccggcgccgacgccatctcccacggcgccaccggcaagggcaacgaccaggtccgcttcgagctgggcgcctacgcgctgaagcccggcgtcaaggtgatcgcgccctggcgcgagtgggacctgctgtcccgcgagaagctgatggactatgccgagaagcacggcatcccgatcgagcgccacggcaagaagaagtcgccgtactcgatggacgccaacctcctgcatatctcctacgaaggcggcgtgctggaagatacctggaccgagcacgaagaagacatgtggaagtggaccgcttccccggaaaacgcgccggacaccccgacctacatcgagctgacctaccgcaagggcgacatcgtcgccatcgacggcaaggacatgaccccggccgaggtgctcaccgagctgaaccgcgtcggcgggatcaacggtatcggccgcctcgacatcgtcgagaaccgctatgtcggcatgaagtcccgtggctgctacgagacccccggcggcaccatcatgctcaaggcccaccgcgccatcgagtcgatcaccctggaccgcgaagtggcccacctgaaagacgagctgatgcccaagtacgccagcctgatctacaccggctactggtggagcccggagcgcctgatgctgcagcagatgatcgacgcctcgcaggtcaacgtgaacggcgtagtgcgcctgaagctgtacaagggcaacgtcgtggtggtgggccgcaagtccgacgactcgctgttcgacgccaacatcgcgaccttcgaggaagacggcggcgcctacaaccaggccgatgccgcgggcttcatcaagctcaacgcgctgcgcatgcgcatcgccgcgaacaagggccgcacgctgtcctgaccgacgcgcgccgcctgcgatggaacgaagaaccccggccatgagccggggttcttcgttccggattgctgaaagcgatagccggggccgttcaggaagacttctggatcagttcgatcttgtagccgtccgggtcggtcacgaaggcgatcacggtggtaccgtgcttcatcggcccggcttcgcgggtgacctggccgccgttgttgcggatgtcgtcgcaggcctggtaggcgtcgtcgacctcgatggcgatatggccgtagccggtgccgatctcgtaggcatccacgccccagttgtgggtaagctcgatcaccgcggaatccgcctcgttgccatagccgacgaaggcgagggtgaactggccgtcgggatagtcgttcttcctgagcagggtcatgcctagcacccgggtatagaaatcgatcgagcgatcgatgtttccgacccggatcatggtatggagaatgcgcattttcattgcctcgagcttcacggtcaaaggcggattttaccatgtggccggcaaccggctgcgagatcgggatcgtccccgtcccggcgaccggccctttgccggacttcccttcctacggggcgtttcgcctcttccctgggccggccgtcgatagccggtcggcctgcctccgccaccctcccgagctgcccgctacgtctccgagcgtgccaggcgtcccgcccccggtgaccggccgaaagctcgctgcgccttcgccatgaggtcggaaaaaaggggggttgaccttgccaaggtgtcaaggttgataaccggccacggaagcggtttcgtccagccaggccacgcaggctcagaccaggaaggcataacaatgaatctcagacacttcatccgcatcaccgcgacgctaggcgtcgcggcccttatcgctggctgcggggaatcggcgccgcccggggcggcgagcgccccgccaagcgttcccgtcgccgaggtggtggttcgcccggtgacaccctacgccgagttcgccggctcgctgaccgctgtcgagcaggtagaactgcggccgcgcgtcgccggctacatccaggacgttacggtgccggaaggccgcctggtagagaagggccagcaactgttcctcatcgacccgcgcgtgttcaaggcggcgcaggatgccgccagggcacgcctgcgcgaggccgaggccgcggcgttgctggcgcgcaccgaacacgagcgagccgagctgctgtatgcgcggaaggtcgtcgcccgggagcggctcgacagcgccatcgcctcgcgcaatgccagcaaggcccaggtcgatgcggccagggccgccctcgacgcggcgcaactggatctcggcttcacgcgggtgacggcaccgatcggcgggcgtgtcgggcatatccaggtcaccgagggcaactacgtcaccaatggcgtcaccgcgctgaccagcatcgtttcggtcgatccgctgtacgtgtacttcgatgtcgacgagcgcacctacctgcaggccctggcgccgacccgcggcagggaaggcgagcaggcccccagggtcaaggtggcgctgctcaccgacgagtcctatggacgaagcagtcgcctcgatttcctcgccaacgccgccgaccgcgggaccggcacggtccgggttcgggcggtggtcgacaacccggacgggcaactgacgccggggctgttcgccaaggtcaggctggagaccggcaagcctcgcgcgcaggtgctggtcgccgaccattccatcggcaccgaccagggcaggcgctatgtgctggtcgtcgacgaaggcaacaagacccagtaccggccggtggaactcggcccgatggtcgacggcctgcgggtcgtccgccagggcctgcagccgggcgagcgcatcgtcgtcaagggcctggtccggccggacatgcagatcacaccgcgccttgcggaaatcgatggcacgcccgtcgacctgtcgaagaccgtgggggccgcacaatgacattcccacgcttcttcatcgataggccgatcttcgccatcgttctttcggtgctgatgatgatcggaggcatcgtttcgttcttccagttgccgctgagcgaatacccggcggtgacgccgccgaccgtgcaggtgactaccgcctatcccggcgccaaccccgacgtgatcgcgcagacggtggcgacaccgctggagcaggcgatcaccggggtcgaggggatgctgtacatgtcctcgcagtcggccaccgacgggcgaatgatcctgaccatcaccttcgaccagcacatcgatcccgacatggcccagatccaggtgcagaaccgggtctcgcgggtgctctcgcgcctgcccgacgaggtgcagcggcagggcgtggtcacccagaagacctcgccggacatcctcatggtggtgcacctgctgtcgccggagcaacgctacgacccgctgtacatctcgaactacgcctacctccaggtgcgcgacgaactgctgcgcttgccggggatcagcgatgtggtggtgtggggcgccggcgagtacagcatgcgcctgtggctcgaccccgacctgatcgccgcgcgcgggctgacggcgggcgaggtgatcgccgcggtacgcgaacagaacgtccaggtggcggccggcgccgtcggccaggcgccggactccaccgcggccttccaggtcacggtgaataccctcgggcggctgagcgacgaagagcagttcggcgacatcatcgtccgcaccggcgccgacggccaggtgacgcgcctgcgcgacgtcgcgcggatcgagatgggcggcgatgcctatgcgctgcgcagcctgctggacggcgagccggcggtggccttgcagatcatccagagccccggagccaacgcgctggataccgccgaggcggtgcgtgccaccgtggcgaggctcgaaggcaacttcccggccggtctgagcgcgcgcatcgcctacgacccgacggtgttcgtccgcgcttcgttgcagaccgtggccaccaccctgctggaggcgatcctgctggtcgtggtggtggtggtgctgttcctgcgtagctggcgtgcttcgctgattccgctgatggccgtgccggtctcgctggtcggcaccttcgccatcatgcacctgatgggtttctcgctgaataccctgtcgctgttcggcctggtgctgtcgatcggcatcgtcgtcgatgacgccatcgtggtggtggaaaacgtcgagcgccacatcgagaacggcgagccgccgctccaggccgcgcggcgtgcgatggacgaggtcaccggaccgatcatggcgattacctcggtgctggcggcagtgttcatccccacggcctttctcagtggcctgcagggcgagttctatcgtcagttcgccctgaccatcgccatctccaccatcctgtcggcgctcaactcgctgaccctcagcccggccctggcgggcctgctgttgcgtccgcggccggccggagatgcggtggcggggcgcttccagcgactgctccaggtcctcggccgaccgttgcgaaatgcccccgaggcctacggcaacgcggtgcgcaaggtggtgcgggtgagcggcctggccctggtggtgtatgggggcctgcttggcctgacctgggtcggtttccaggcggtgccaccgggcttcgtgccgatgcaggacaagtactatctggtcggcatcgcccagttgccgaacggagcgtcgctggagcgtaccgatgcggtggtcaggcagatgtcccggatcggcctcgaggagccgggggtggagagcgtcgtggccttcccgggcctgtcggtgaacggtttcgtcaacgtgccgaacgccgcggtcatgttcttcatgctcgatccgttcgaatcgcgcacctccgccgatctcggcgcgctggccatcgccgggcgcctgcaagccaggttcgccagcattcccgacggcttcctcggggtcttcccgccgccgccggtaccggggctgggaaccatcggcggcttcaagatgcaggtcgaggatcgcggcggcgccgggctggaagccctggccaggcagacccaggtgctgatgatgaaggccactgagtccggccagctcgggggcttgatgaccagcttcgatatcaatgccccgcagctcgaggtggtggtcgaccgcaccaaggtgaagagccagggcgttcgcctggccgatgtgttcgaggcattgcaggtctacctcggctcgctgtacatcaacgacttcaaccgcttcggtcgcacctacaaggtcactgcccaggccgatgcgccgcaccgcatgcaggccgaagccatcgggcgcctgcaggtacgcaatgccgccggggcgatgttgccgctgtcctcgttcgtcaccgtgacgcccagctccggtcccgaccgggtgatccactacaacggctatccgtcggcggatatcagcggcggcgcgcttcccggcgtcagttcgggacaggcggtggcgttgatggagcgcctggccggcgaagtgctgcccgagggcatgaccttcgaatggaccgacctgacctaccagcagaagctggccggcaacagcgcgctgttcatcttcccgctgtgcgtgctgctggcctacctgatcctcgccgcgcagtacaacagctggctgttgccgctggcggtcctgctgatcgtgccgatgtgcctgctcagcgcgatcgccggggtgtggctggtgggcggcgacaacaacgtgttcgtccagatcgggctggtggtgctggtcggcctggcggcgaagaacgcgatcctgatcgtcgagttcgcccgcacgctggaggccgagggcgcccgtgcgctggaggcggtggtcgaggcttgccgcctgcgcctgcggccgatcctgatgacctcgctggcgttcatcgccggcgtggtgccgttggtcatggccagcggcgccggagcggaaatgcgccaggcgatgggcgtcgcggtattcgccgggatgctcggggtgacgctgttcggcctgttcctcacgccggtgttctacgtactggtacgggcactggcggcgcgcctggagcgacgcgccggcggcagcctggcgcatctggagggaggccgtccatgaagccatacctgcggtcttcgttgagcgcgctgatcctgctgggcggctgtgccgcggtggggcccgactatgcgccgccgagcgcgtccgcaccggccagcttcggcgcgatgccggcgggtatcgatggcggtggcgtggagatcgagtggtggcgcgggttcgacgagccagccctggagtctctgatccagcgggcgctcgcggcgaacctcgacatcgcccttgccggcgcgcgcctggacgaagcgaaggcgctgctgcgcgagaaccgcgaagagttcctgccgcgcggcggcccggcgttcgattaccaggcccggcggcgcggcgaggtggaaacaccggccggccagcagcgcgacatcgagacctatcgcggcgcgctggatgcttcctgggaaatcgacctgttcggccgggtgcggcgctcggtggaggccgccgaggcgcaggcgggctcgcgcgaggccctgctgcgcaacgtgcaggcgagcgtcgcggctacggttgccatgacctggttccagctacagggcatcgaggccgaacttgcggtggtccatgacatcgccggcaaccagcgcgacagcctggagatggtcgaacgcctggtcagcgccggctccgcccacgagttcgaccggttacgcgccgaagcgttattgcacaacgtcgaggcggccgtgcccgacctcgaacggcgccgcgccgccacccgcaatgcgctggccgttctcctcgcggaagccccgcaggccttcagcccgccggtcgcccgtgcctccggggaaaggctgacgctccgcaccctcggggtcggcgatccggcgggactgctggcgcgtcgcgccgacatcgccgcggccgaacgcaacctggcggccgcgaccgcacgtatcggcgtcgagaccgcggggctgtatccgcaggtcgaggtacgcggctcgatcggcctggtcgccggcaatctcgatgctttggacgagagtggtacgtccttcaacgtcctgaacccggtgattcgctgggcgttactcgaccgcggtcgcgtgcgggcgcggatcgccgccagcgaggcccgtgcgcaggaggcattgatcctctacgaccggacggtgctgcgcgccctgcaggagaccgatgatgccttcaacggctatggcgctgccgctgacaggctccgcctgcgcctgctcgaggcgacggccaatcgcgaggcggcgcgcctggcccgggaacgcttcgtccagggggacggcgagtacctggacgtgctcgaggcggaacgctcggactacctcagccggcgcgcattgagcatcgcgcgcaccgagcagcgccttgccgtcgtgggtatctacaaggcgctgggtggtggctgggaagcctgcgcgggggcgcggcgctgtggcgtggctaccgacgatacctctccaggcgtggcacggcagcgcgacagtcgctcctgatcagccgccggcggtttccggccgccggccttcgctcgactgcctaggtcgagggccgtgcggcgcgtcctccggttatttggcgaaccccgggagtacggattgcctggcgcggatcgctcgtccctgtccgccttatcgataagtcggttccgaactctttttcggtagttcattcagatggatgagtgaagagggcagatggaaagtatctgctcgggacttcaatgttcagaagagtggggaagtattactttctcattgttcttcaggtacgttccggctgcccgccgtttcttattgaacgaagtcactcctgtgcctctgcgctcgcgccgcacggagacgtcgaatacatatcgtcgagaggttcttcagtggtgagtggagctggctgatgcggtgtctcgattgcctggcggagttgttctatatgttcgttcttggctttgcccgttgtttgaagtttgcggagtaacctctggaactattcatatgaatttttgaaagtttggtttacctgagagatttatgagttgaccttgtcacgatggcaggactcatggttcgcaggagtcaacaaaccaggaggttgcgatgttttctttccatattccgaacatgacctgcggcggttgtgccaagactgtcacccgtatcctgcacggcgtcgatccccaggcgcgcgtagagaccgatccccctcggcgcgaggctagggtcgagagcactctggacaagcacgcattcctcgaggcgttgagcgaggccggttatccggagggccgttgagtgcatgggcatgacgcaggcgtagggtcggatagtagcgtttcgcccagtgccggcaataggaaaatgattttcattgaagtctgcgcgccatatgccatcaatggcgcttggctattgtggaaagaacgctttggaatttgtaaatcaatatttcagtcggccgcgaggtgacagttatgtgaacggaaagaggcgctgacaggaaaccctaaaagttattctccgatggattcgcaggcctttagctcggggtttttcgcagcgcatccagtgttatcgaagagcacctttcggcgaactccgttgtccgccgagaaggccgctgcattgcttgaccttgccaccgtggcaagctttacggtcgccccgcacaacaacaaaaacaagggtgatccaaatgacttcaaatccgttacagcaatgctgcagttcttcctccgatatgaatatccgttcccagcggacaatgtcggaacctgcccgaaatgcatcggctctcctggctgaagccttgaaacccggtgcctccctggaccagatcacgctcgcgctcgaggcgattctcgcggtcacggccaaaggcctgggcggcgatgcttcggcttacgcgcagtaccaggcgttgctcctggaactgcacgtaggcagcgatccgcatacggagccgacccgccgctggatggcgagccaggtctacctggtcgaggatcgtttcgctcccgagccggccggtttcagcgccgtcccggtggaggagttccgcaagaaggtcgacgccgagatcgaggcgcgcagccgggtgcgccatcccatgtcggtccacctgttccagggcacgccgccggtcgaggacgtgcgcttcttcctggaacaccattgggtccgttcctacaacttctacagcctcctggcggagctggccttccgcttcgaaaacatcgaggacgcctcggtgttctaccgcaacctctacggcgaggccggggcggagacgccggagcgctcgcaccccgcgttgctgtcccacctgatgacctacttcgacataccgctgcgcatcgatttcccggcgctgcatccgctggagaaggcctacctcaacaaccgtatccgttgcgtgcggcacaccgatgtcgcctggggccttgcgctcctgtacgcggtcgagtcggtgagctgcgtcaaccaccggcgtatctacgaactcctgcagcgcctgggcgtgcccgagcaacccagcgagttccatcgcctgcacggcacccaggacgagatcgataccgaggagatgtgggcgctgatcgccaagttcgcgccgagcgaagacttccagcgcaagttcatgcagtcgctggcgcgccacttcgaaatcaaccgggcctacttcgacctgctctgggagcagatgcaggcgaattccctggccatggcctgatgcctatccagaacaagaacaaggagtacaggatgaatacccgcaatttttccctgccgcagttgcagaacctgcccatcgaagaagcacgcatcgttgccgatgcgctggccgtccacgctacttcccgccagatcgatagcgccgcgagcaagctggccgcgctggccgaggcagggctcaagggcgaccgccaggcctatgccgcgtaccagcagttgctctacgtcctttcgttgagcgacgacgtggcgaccgcccagacccggcgctggctggcccgggcgatctatcgcgtcgaagagcgtttcatgcccgccgccgatctttccagggcgttgtccgaggaggatttccagaagcgactcgaacaggaaatcgccgcgcagtcccgcgagcggcacccgatgtcgcagtacgtgttctccggctcggcctcccgcgcgcagctccaggtgttcctccgtcaccagtggttccgcaccttccgcctgtaccgcgatgcggccgacctgttggtcaacctgaccgatgtggacgaggccgcggcgctcgcgcgttacctctatggcgagttgggcgaggaagacgaaaagggttcgcatccgcgcctgctggccaagctgctcgaggccatcggccttgaggcggacttccaggccgtgtcgacgatgcccgaggaaatcgcctacctgaacaatcgtgcccgtgccttccggcatgccgaggtcggttgggggctggcggtgttctacatcaccgaactggtcgtgccggggaaccacgaaaagctctatcgggccctgctccaggccggcctgagcgaggaccaggcggagtactacaaggtccacatcagcctcgtaccgccgcgggccaagcgcgaatggcaactcatcgcgcggcggattccggacgtgcagttccagaatgcgttcctgacctcgctatcgcagcacttccgtgtggaaagggcctattacgacgcgatctgggaagagatgcagagcgtcaagtgacttccaccgggacaaagcgagcactcgaaaatgccaagtcacattacggaatcccgtatacacgggggcgcctactcgtccccggcattcgccgcgatcttttccgataccaaccaggtgcggaggtggctggatgtcgagcgagccttggcggcgacccaggccgagatgggcatcatcccccacgaggcggcgcgggagatcgaccgcgccgcccaggtggagcgcttcgacctcacccaactgggccgcgaaagcctggagacagggcacctgctggtgcctaccatccgcgccctggcgaggttgtgcgagggtagctggggggagtacgtgcactatggcgtgaccacccaggacatcctagacaccgggctgatgctgcaggtcaaggaagcctggggccatacgctcgggctcctgcactcgatccgtggccatctgctggcgctcgccctgcgccaccagcacacgccgatggttgcacgcacccacgggcagcaggcgctgcccacgaccttcggctacaaggtcgccgtctgggtggatgaaatcgaccgtcacctggcgcgcttcgacgaggcgcgcgaacgcgtcctggtcggcaacctgaccggtgccgtgggaaccctggcgtcgttcggcgcccagggcttcgagctacagcggcgaaccctggccaggcttggtctcggcgcgccgtcgaccagttggcacagcgcccgggaccgggtgctggaggttgccgggttgctggtccaggtgtcggtgacgctgggccgggtggcgaacgagatctaccacttgcagcgcagcgaaatcgatgaggtacgcgagggcagccggccgggacaggtgggcagcagcaccatgccgcacaagcggaacccgtcgtcggtcgacctggtcagcgcgctgtcgcggctggtgcgggcacagatggtggcgctcaccgatgccgcgttccagttgcacgagcgcgacggcaccgcctggcgcatcgagtgggcggcgttgccggagctgttcgtctacgccggcgccttgctgacccgcatggaggcggtgctggccgaggggctcgaggtgcgcgaggaacgcatgcgcgccaacctcgacctgctgggtgggctgatcctgtcggagcgggtcatgctcgcgctggcggggcagttcggcaagcagaccgcccacgaactgctccatgagataacccaggcctcccagcggcagggcgttccgttccgcgaggcgctgctcgggcagccaaggttgcgcggctgtttcagcgccgaggcgctcgaagaactgctcgaccccgtcggctacgtcggcctcgccgccgagatggtcgacctggtcgccggcaaaccacgaaccggcgcgtcgggcgacaggcccgaaggcgccgcctcttcccaaggaaatcccggtcagtcccagtacgtgatggaggataggtgatggatgctgaatcgctggaaatgcttgcccgttcctcgtgcaccgcgcatccgcagagcttcggcggcgcaccggccgagtcgtcctgcaagcacgaacacagtcacatcgttgactctaaaacccatggcggcggctacgccggtccggtgagccgacggatcttctgtagccactgccgcctgcaacgctggctcgacgtggaggcggcgctggcgctggcgcaggccgatgtcggcgtcattccgcccgaggccgcgctggagatcgcgaaggccgccaggctttcggccgtcgacctgcagcagatcgccgacggcgtggccagcaccgggcactcgctgatgcccctgctgggtgcgctgcaacggaactgcagccccagcgcgcgcgagtacgtgcatttcggcgcgaccacgcaggatatccaggacaccgcgcagtccctggaaatgcgcgatgtgctggatgaaacggagcgggcgctggacatcctcctggaccggctctcggtgctggcgagcgggacccgcaatgcgctgatggtcgccaggacccactcgatcccggcgttgccgaccaccttcgggctgaaggtggccggctggatcgacgagttgctgcgtcaccgcgaacgcctgggcgaggcgcgcaagcggatcctggtggtgcaactgttcggcggcgtgggcacgatggccgccttcggcgacgaggccatgctcctgctcgaaagcttcgcgcggcggctgtcgctggacgtgccgctggcgggttggcacgtgtcccgcgaccgggttaccgagttcgtcagcaccctggccatggtcaccgcgtccctggcgcggatcgccgacgagatccgcaccctgaaccgctgggagatcggcgagctggaggtgggctggacgcagcagcagatcggtagcagcaccatgccccacaagcgcaatccggaaggctgcgagcaggtcgtggtgctggcccggctggccaaggcccaggtcctgctcgcgttggacgccatgatcctcgagcacgagcgggactaccgcggcacgcgcctggaatggtgtgcggtggcggacgtttcccactatgcgctgatggcgctgtcgctgctgaccgacaccatcgacgggctcacggtccacgacgagaccatggcgcggacggcgaatgcatacagcgatgcgatctgtaccgaggcgttcgtcttcgagatggccaagcaactgggcaagagcagcgcttacgaaatcatcttcgagatcacccaggcctgccagcgcaagcggattccgatgcgccaggcgctcgagtcggatccgcgggtgggcgccgtcatgccgaaggaaaccctggccaggctgttcgagccgcggacccatctcggcatggccgggaccatcgtcgacaaggtgctggacaaggtcgccagccaccactgaatcacccgccgccagaggcggcggtactgcacatcaacggagaacaagaatgacaaaggctaacgagatcgaaaccgcgaaggtcaagcagttttcagcacggatcatggaggactacggcaataccctgcgcggcgcgatgctctacatcggcgaccgcctggggctgttcaaggcgctcgcccatggccaatgggtgaccctggaagagctggcgcagcagaccggctacaccacccgctacctgcgcgaatggctgggcagcatggtcaccggcaactacctggcctacgatccgcagagcaggagctatcggttgccggccgagttcgtcccggtgctcgccgacgaggactcgccttatttcgccggcgggatcatccagttgagcgtgcccttcgtgagcatggcgccgaagatcatcgaggccttccgctgcggcggcggttgccccgaggaatccttcccgctggaaacctgggaaggcatggagcgcatgaccatgccctggtacaagcacttcctcgtgcaacactggattccttcgctggatggcgtcaaggaaaagctccaggcgggtggcagcgtgctcgatttcggctgcggcagcgggctggccgcgatcatgatggccaaggcgttccccgaagcccaggtctatggctgtgacttccacgcgccgtccatcgaacgcgcgcgggcgaacgccgaggccgcgggggtcggcgaccgggtgcgcttcgaggtcagcgattccgatgcgctggcgggcaagaagttcgacttcgtcacgaccttcgtggtcatccacgacgcgaccgacccgcagcagatgatgaaggacctgcgcgagtcgaccgccgacgatgggacctacctgatggtggaactcaacctgtcgcaggaactgcacgagaacatgaacctgttcggtcgcgtgatgtacccgcagagcacgctgtattgcatgacctgttcgctgtcccacggcggcgagggcctcggcgccttcatgggcgaggaccgcgcgcggcagatggccgaggccgccggcttcagtcgcttccgcaaggtgccttcggagtggccgccgctgccggcgctgttcgaactgcgaccctgacggcgttatccgggacggccgggacggcgaccgtcggatagcggttgccgtggccgccgcccggcgcgtgccggctgggcatggcggtctcggctcgatcgcaccggtgttcaggcccgcttcggcgggcttttcatggcccccggaaaaacgaagccccgccaattgcggggcttgcttgcggtgtgggcggcgctctcacaggtcgaagtcgtagtccgacaactggcgctgcaggcggcgttcttccagcaggttgtcgatgatgcgacgcttggtcaggttggtcttggccacctcgacgctggtttcctcgccgtcatcctcttcaacgccggcttcgtcgtcgatctcgagttcttctttggcttttgccatgacattcactccaacttatggggtggtaatggcgcaccttatagcgacaaagccgtggctggtaaaaaagattttttcaatcgtaaagataggatttcgaatagttgatcaatcgtctgaagtcttgtgcttgtattcgcacaggtcctcgatccggcagcttccgcattgcggcttgcgcgccttgcagacgtagcggccatgcaggatcagccagtggtgggcatcgagcaggtactcgcgcggcacgaacttcagcagtttcttctccacttccagaacgttctttcccggtgctatgccggtgcggttggcgacgcggaagatatgcgtgtccaccgccatggccagttgccggaaggcggtattgagcaccacgttggcggtcttgcggccaaccccgggcagggcttcgaggtcctcgcggttgtcggggacctggccgccgtgcttttcgatgaggatgcggcaggtttcgatgacgttcttcgccttgctgttgtagaggccgatggtcttgatgtactccgacagcccctcgacgccgagggcgtggatcgcctcgggggtgttggccaccggatagaggcgggcggtggccttgttcaccccgacgtcggtggcctgggcggagaggatcaccgcgatgagcagttcgaagggggtggtgtaggccagttcggtccttggctcggggttgtcttcgtgcagtcggcggaagatctccgcgcgcttggcggcattcattcaatcactccggtgacgcggacgcgctggcgctgggtggcgggtacgtcgcccgcctgcaccttggcgcgttccgccaggctttcatcgatacggttcttcagggcgatcagcaggccgagcatgatgaacgcgcccggcggcaggatcgccagcaggaagccctggtactgcgggaacggctggatcttccagtccgccgccgccgggccgaacagcaagtgcatgtcggccagcagggtaccctggccgagcagctcgcgcaggccgccgaggaccagcaggaccagggcgaagccgaggcccatcagcagtccgtcgaagctggcgcgcagcacgccgttcttcgccgcgaaggcctcggcgcgaccgaggatcacgcagttggtggtgatcagcgggatgaagatgccgaggacctggtacagctcgtaggtccaggcctgcatcagcagttcgatgcaggtggtcagcgcggcgatgatcatgacgaacgccggcagccggatcgcctcgctcaccgcgccgcgcaccaacgataccgcggcattggagcaggccagcacgagcatggtggccaggcccaggccgagggcgttgaccgtcgagttgctggtgcccagcagcgggcacaggccgagcaactggaccaggcccgggttgttgcgccacaggccgttgcgggcgatctcgcggaaatcttgttcactcatgtccggcagcctcttcgggggcgagcaggcgttcgcggttggcgtcgaagtagcgcagcgccttgtgcacggcgcggaccacggcgcgcggggtgacggtggcgccggcgaactggtcgaacgtaccgccgtccttcttcaccgcccagccggcgtccgccgggtcgcccaggctcttgccgtcgaaaccgtgcacccagggactcttggccagttcgatgcggtcgccgaggccgggggtttccttgtgcgcgacgacccgcacgccgagcagccggccctgggcggtgaccccgaccagtagctggatggcgccgctgtagccatccggcgcgctggcctggaggatgactgcgctggcctggccgtgcaggcgggcgacataggccggacgcggcgcatccaggccgagcagcttcggcgcgaaggttggcacctggctgtccagcggatggttgtcgtagctgcccggcggcagcagttccagcagggcgcggccgcgcgcctcgcgctgggcttcggcgatgcgcgcttctgtgaattgctgcaccagggccaccaggcccaccccgaccagggcgaagagcccgagcaggagggcgttgcgcagcatcgaacggcgagtcgcggcgtccatcagtcgcctgccttgaagccgcgctcggccttgcgatggccgtaggtgcgcggccgggtgtagtagtcgatggtcggcgccgccaggttcatcagcagcacggcgaacgccacgccatcgggatagccgccccaggcgcggatgacgtaggtgaggacgccgacgccgaggccgaagaccagccgcccgcgattgctggtggcgccggacaccgggtcggtgacgatgaagaaggcgccgagcatggtcgccccgctgaacagatggaacagtggcgagccatgggaatcggagccggaaccattccagaacagcaggctcatggcgaacaggccggcgagcatgcccagcggcgcgtgccaggtgaacagccggcgccagagcaggaacaggccgccgaggaggaacgccaggttgacccactcgctgccggcgctaccgaggtggccgaaggccgggttgccggcgaacagctcatcgacggtcaggctgcggtcggtcttcagcacgtcgagggcggtggcgtgggcccaggcgtccggccgggtagcgaggccgaggaattcgcggaggctgtcgggcaggccgagggcgctgtccggcgagggccagcgggtcatttccaggggaaacgagaccagcgccacgacgtagccgagcatcgccgggttgaacgggttctgtccgaggccgccgtacaggtgcttgccgaataccagggcgaagaaggtcgccaccagggtcagccaccagggggcgtagggcggcagggcgactgccagcaacagggcggtgaccagcgcgctgccgtccttgaggaacacccccggcggacgtttgcgcagggccagcatggcggcttcgcaggccagcgcgacgaggctggcccaggccaggttgagcagggtgcccgggccgtacagccaggtcagcgtcagcaggcctgggacgcaggcgccgagcaccaggcgcatgatcgccggggtacggttggagccgcgggcgtggggcgaggtggggcggggcagggccatggtcactccgtgccgtgttcggtcagggcgcgctcggcggcgctcaggcgcgcgcgggcggcggcgagtgcggcggcgtcggcgttcgccaggcgttcgagcttcttcagggcggcgcgggcgtaggccagctcggtcttcagctcgcgggtgcgcgggtcgaccgggcgcttgtcgatccgcaccagctccggcgccggcttgccgcaggcgtcctcggcggcatgcaggtcgcgctcggcggcttgcagctcgccgcgcaggcgttccagctcgctgtccatcaccccggcctgctcggccttcttcaaggccgcgcgcttgccgaccagggcgatcttcgcccgcttcagcgccgcctggccgtcgtcgccgggcgccgcgggcttcggcgcgtgacgctcgaggcgggccagggtggcttcgcaacgctcgacctcggcgcgcagttcgtcgagggtcgcccgctgctcggcgccgggcgcttcgccgaaggccttttccgagcgcttgagctgggcgcgggccatggcggcctgggccttggccttcttcagttcggcttcgtcgtcgatcgcggcaggcggtgcgctgggtaggtcgcgcggcaggctggcttcggcatcggccagggccttgtcggcggcctcggcggcggcgcgcagttccgcgaccaggccatgctgttccggggtgtcgtggctgagcaactgtttctcggccttcttcagggccacccgcgccatgctcgcttcgatcttcagccgtttcagccgttcgctgccgctaccggcctgcttgcgcgccctggcccgctcgatcgccgcctgcaccgggtcgaccgccgtggcgggggcggcttcctcgcgctcggcctgggcggcgcgcgccagcgcggccttctccgcgcgttgggcgcgttctgcggcccggcgctcctcgtcgcggcgcaggcgagcttggcgttgctcgaaacgctcacgggattgttcggccttcagcagcttctgccgctgctcgcggatctccgccttggacgcgcggtagtactgcaccaggggaatgctcgacgggcagacgtaggcgcaggcgccgcattcgatgcaatcgaacaggttgtgggcgagcaattgctcgtgctcgtcgcccagggcgaagaaatgcagttgttgtggcagcaggctgacggggcagacctgggcgcagtcgccgcagcggatacagggcatggccggcactggttccggcagctccgtggcatcgccggcgagcaggcagttgcaggtcttgatcagcggcaccgagagatcgggcagggcgaagcccatcatcggcccgcccatcagcacgcgttccaggcgtccctcggcgaggccggcgaacgccagcaactcgtgtaccggcgtaccgatcagcgcctcgacgttcatcggccgctccagggcgccgccggcgagggtagtgatccgcgagatcagcggccgaccgaggacgacggcatcgtgcacggcggccagggtgccgacgttctggcacaggatgccgatgtccgccggcaggccgtccgccgggacttccctgccggtgagcaactggatcagctggcgctcgccgcccgagggatagcgggtcggcagggcgacgatgcgatagggccgttcaccgagggcggcgccgagggcggcgatggcttccggtttgtcgtcctcgatgccgaccagcacctcttcggggcacaggatctgcaccaggatatcgatgccgcccagcacctgcgtggcgcgctcgcgcatgagcaggtcgtcggcgctgatgtagggctcgcattcggcgccgttcaccaccagcgtatggatcttttccgccgggcgcgcggcgagcttggccgcggtggggaagccggcgccgccgagaccgccgatgccggccgcgcggatgcgttcgagcaacgccagcggactttcggcgcggaagtccgggcagggatgcagctcggtccagcgctccaggccgtcgctggcgatgacgatggccggcgcgggaagaccggaggcatgcggataggggtgtgcgccgatcgccaccacggtacccgaggtcggggcatgcagcgcggcgctgacggtgccgtccgggagggcgatggtctggcccttgagtacggcctggccgacttccacgcaaggtcgcgccggcgcgccgatgtgctggccgagcggcacgatgtagcgctgcgccagcggcgcctgctggatcggcagggcggtggagcgctccttgttggccggcaggcagaggccgccggggaaggcgtgcagggcgctcatgccgctcgctcccggtcgctggcgatcagtcgcggcgacggctgcggccatttccagtggcgcacgtcgtccggtatctcgcgcatctcgatgcagtccaccggacagggctccaggcacaggtcgcaaccggtgcattcgtcggcgatcaccgtgtgcatcaaccgtgcggcgccgacgatggcgtccaccgggcaggcctggatgcacttggtgcagccgatgcattcggcctcgcggatgtaggctacccgcggcggggtttcctcggcggcgtcgagcggctcgggctccaggtcgagcaggtcggcgagggcgcggatggtcgcttcgccgcccggcgggcacttgttgatcttgtcgccggcggcgatcgcctcggcgtagggcttgcagccggggtagccacactggccgcactgggtctgcggcaacagggcgttgacctgctcggcgaccggatcgccctggacgcggaagcgcaccgccgcatagccgagcagcgcaccgccggccaggcagatcggcagcagcgcgccgatcgccaggaacacgccgttcatggccggaccaacccactgaagcccatgaacgccagcgacatcaggccggcggtgatcatgccgatggccgcgccgcggaacggcgccggcacgtcggcgatggcgatgcgctcgcgcagggcggcgaacagcaccagcaccagggaaaagcccagcccggcgccgaagccctgggtagtggcctggaggaagccgtattcagccttgttggcgttgagcagggcgacgccgaggacgatgcaattggtggtgatcagcggcaggaagatgccgagcacccggtacagcagcgggctggtcttcttcaccagcatctcggtgaactgcaccaccaccgcgatcaccaggatgaagccgatggtgcgcaggtactccaggtccagcgggcgcagcacgtagcgttgcaggatatggctgcacatcgccgccagggtcaggacgaaggtggtggcgagggacaggccgatggccgtctcgatcttccgcgacacgcccatgaacgggcacaggccgaggaactgcaccaggacaaagttgttgaccaggatggcgctgaccaggatcagggcgagttcagtcatacgcgaagcattcgttgcagggccggggccgtcgggggaaatcccctattatcgggtgggattgccctgcaaggctagcgcaaacacgtacgaaagaccgggagacggactgccgttgcgtctcccggggtcgcgctcactgcaacctggcccgctccagcagcgcccaggccagggcgaaggtcggttcgccatcctcgctctgctcgctggcgctgaccacgatccaccgcgcgcccgccggcttggctgcccacaggcggtattcgctgcctgcggagccgccgtcgtcttcctctaccttgtagcgcgcctcgccgtcgcccaggcgcctgctcgccaggtcgggcgggggcggcgcgtcccggcgctggacttccagttggcgtgggttgcgcagcttgccgccttcgtcgaagcggaagccctcggcgctgcgccgcgcgtcgaagccgacggggcgctccaccaccaggccgttcgggtgggtcagggtcttgtcgaagtccaccccggactccgcggtgcaggccagcagggcgaggctggcgagaatcagggcgactgtcttcatgggaacctcattccagggtcgaggaaggtggcgtaggcatcgtcgacgaacatcggccagcccggcgacaggttgtcgtcccagggccgcgaggtgtattccgaggccagcgcgcggacattgtcccgcggccagttgcgcggattgccggcgtaggcgcggagatcgatggagggaaatgcgccgcgggtcttcggcagcttgcgcaggtcctgttgcgacgccaggttggcgacgtagcggatgtaacgggcggtggcgaagatgttgaattcgtcggaggccagcagggtggcgaccgccttgcgcgacaggccgcggcgcaccggctggccgagcaggtcggtgaacagctcgtactttatcgcggtggagaccaccacctggccgaggccgatggaggtgttggcgctcttgatgctgactgccgcctgatagtccttggcgtcttcgtcgcgggtctggtcacgctgctcggcgaggatgatcgcgccgatcaattgcggcgtcaggtcgtacttgcgcgcagccgcggacatgaccttggcccgcgacggcgggttgcccggataggcgtcggggaacagcgtgctgatcggctggccgaccagcgtctgtgcctggttcagcttgtcttgcggcgacagctggctcaggtaggcgcccaggtcgccgagcgggttgctgtacttggtgacggtcgccgggtccttgttgagcagcttgagctggtcgccgaaggcaatggacggcaggtcggtcggattgacgccggtggcgccgaccccgctgaacggaccctggatcgcctggctggccaccccggtggcgccggccgcggcgaagcccaggcgaccggcggcgtcggcgaggtcggcgcagatgtcgaagaaagtgatggtggggaagtagatccagttgtcggtctgggtgcccaggggattgttgaccaggctgcggatcaaggcattgcgtgcctggtagcgctgcatggtggtgcgcccggcgatgctggcgaccagcgagcgcgccagttccggcgggcccacccgctggaacagcttgatcagcgagccgctcttgtcgagtgcggcgatggtcgcatcgggcacgttgtcgttgcggatcgcggcgatcacccggcgggcttcctggcgggtcacctgccagtcgtcccagctataggaaatcagtgactcgatcaggtcgctggtggcggtcatcggtcttcctccttgtgagttgccaggcccgtcaggcggtcctgggcgaaagagcggaccctcccggtccgcccgtatgcctgggctcagcgcgcctcgttcttgccgggccgccgcagccagcgccacaggccgcgcagcaacaggcccagcggcagcagcacgacgaggaacggcaggctgtaggcgaagaacttcattgcggcgatggtgccatcgacaaggtcgtcgagcagttgcccggcggccgtggcgagctggccgaggcggctgtccggctgcgcctcgctgctgaagctcagggtcagcaggttggtagcgatgcgccgctgctgctgggcgccggcctgggcgttgtcggccagttgggcttccaccgcggcgatttccttggccagggccagcaggtcgccgacgctcatgtccttgcgcccctggtattgctgcagggtctggtactcgcgttgcaggcgctcgcgttgctggcgggtgtcggcgaccgcctgggccaggtcctcggcgcgggtctgccggctttccagcgtgccgccctcggcagcggccgcgaccagcttctccacgccgtccgggacgatgcgcacggtgagttcggcgtaatggccgataccgccgcgttgttcgatggcgagcacgtcgcactggccgaagcgctcgctgttgcaggcgtcgcggctggcggcgagttgcgcgtcgatacgcgcggcgggaaggcggatgccgacgcggtgttcgtaggcgagggcggtgccgggtttgcccgtctcgccctggaaaccggcattgccggagacgctttcggcgtgttcggcggagcatccgtagagcgccgccagcaggacgccggcggcaagcttccatgcgttcattctatcgagccctccgtggcttcgtggtctgcgttacttgacgcgctggcccggcttggcgccgctgtccggactcagcaggtagatctcctcgccacccgggccggcggccaggaccatgccctcggacaccccgaacttcatcttgcgcggcgccaggttggccacatagagcgtcaggcggccttccagggcactcgggtcgggatatgcgctcttgatcccggagaacacgttacgcttcgcgtcgccgatgtccagcgacaggcgcagcagcttgtcggcgccttcgacgaattcgcacttctcgatcagggcgatgcgcaggtcgaccgcggcgaaagcgtcgaagtcgatctccgcggcgatgggttccttgaccagctcgccgttgccggcgggttgggatgcggcggcgaggtcttccttggaggcttcgatcatggcttctactttcgcgggctcgatacgggtcatcaggggctggaacgggttcaactggtggttggccagcagggtctggtggtcggcccaggtcagcggggcgacgttgaggaaggcttcggcggcggcggccagcttcggcagcaccggcttgaggaagatcaccaactggcggaacaggttgatgcccaggccgcagacggcctggaccttgtcctgctggccttcctgcttggccagcgcccagggcgcctgttcggcgatccaggcgttggcgcggtcggcgagggccatgatctcgcgcatggcgcgattgaagtcgcgggcctcataggcctcggcgattcccggggcggcctcgcggaaggcggcgagcagctccggcgccggatcggcgccgaccagcacgccggcgttgcccttgtggatgaagccggcgcagcggctggcgatgttgacgaccttgccgaccaggtcggagttgaccttctgcacgaagtcctcgaggttcaggtcgaggtcctcgacgccgcggccgagcttggacgcgtagtagtagcgcaggtattccgggtccaggtggtcgaggtaggtgcgcgccttgacgaaggtgccgcgcgacttggacatcttctggccgttcacggtcaggtagccgtgcacgttcagcgcggtcggcttgcggtagccggcgccttcgagcatggccggccagaacagcgcgtggaagttgacgatgtccttgccgatgaagtggtacagctcggcgctggagtccttgccccagaacgcgtcgaagtccagctcgggacgccgcgcgcagaggttcttgaagctggccatgtagccgatcggcgcgtccagccagacgtagaagtacttgccgggagcgtcgggaatctcgaagccgaagtacggcgcgtcacgcgagatgtcccactgctggaggccgctgtccagccattcggcgagcttgttggccaccgactcctgaagggcgccgctgcgggtccattgcttgagcatggcctcgaagtccggcagcttgaagaagtagtgcagcgattccttgagcaccggggtggcgccggagatcgccgatttcgggtccttcagttcggtcggggcgtaggtcgcgccgcaggcctcgcagttgtcgccgtactggtcggcggtgccgcacttcgggcaggtgcccttgatgaagcggtcggcgaggaacatctgcttttccgggtcgaagtactgggtcaccgggcgggtgtcgatgtgcccggcgtcgcgcagtttcaggtagatcgcgctggacagctcgcggttctcttccgagtgggtcgagtggtagttgtcgaagtccaccaggaagtcggcgaagtcgcccatgtgctcggcgcgcacggcgtcgatcagttgctcggaggtgatgccctcgcgctcggcgcggagcatgatcgccgaaccgtgggcgtcgtcggcgcagacgtagacggcctggttgccacgcatcttctggaagcgcacccacatgtccgtctggatgtactccagcatgtgtcccaggtgaatggaaccgttggcgtaggggagggcgctggtaacgaggatcttgcgtggttcggacatgggttcggcttatcggctgagagctaaacggatcggtcactataaagaagcggcggttttttttcatccgcgcgccactcgggtaggatgaccggcatcgattccccgcttaaccctcaggaaatcccccatgtccgctatcactcgccaaacggtggaagccaccctccgccagtaccaggacccctatctgaaccaggaccccgtcagcgccggctgcctgcgcgaggtggagatccagggcgaccgcgtgcgggtgcgcctggaactggggtacgccgccgggctgttcagaaacggcctggcgcaaaccctgcaaatggccctggaggcgctcgacggcgtcgctcgcgccgaggtccgggtcgactgcgtgatccagccgcacaaggcacagccgcaggtcgaggtgatgggcaacgtgaagaacatcgtcgcggtggcttccggcaagggcggcgtcggcaagtccaccaccgccgccaacctggccctggccttggcccgcgagggtgcgcgggtgggcatcctcgacgcggacatctacggacccagccagggcatcatgttcggcctgccggaaggcacccggccgaaggtccgtgagcagaagtggttcgagcccctggaggcgcacggggtgcaggtgatgtcgatggccttcctcaccgacgacagcacgccggtggtctggcgcgggccgatggtctccggtgccctgatccaactgatcacccagaccgcctgggacaacctcgactacctggtggtggacatgccgccgggcaccggcgacatccagctgaccctggcgcagaaggtgccggtggccggcgcggtgatcgtcaccaccccgcaggacctggcgctgctcgacgcgaagaagggcgtggagatgttccgcaaggtgaacatcccggtgctcggcgtggtggagaacatggcggtgcacatctgctccaactgcggccatgccgagcacctgttcggcgagggcggcggcgagaagctggcggcgcagttcggcgtcgagctgctggcgtccatgccgctgtcgatcgccatccgcacccaggccgacagcggccggccgacggtgatcgccgacccggaaagccaactggcgatgctctaccaggaaatcgcccgccatgtcggcgcgcgcatcgttctcagcgagcgggccagcgtcggcctgccgaacatcagcatcagcgacgactgaggcgctcgggcagccgtcggcgacggctgcctttgccctggggcggcggccccggtaagattcgcgatcatttttcgcagctttcgacaggacaccctccatgaccatcaaatcggacaagtggattcgccgcatggctcaggagcacggcatgatcgagccgttcgtcgagcgccaggtgcgcggcgcggacgacagccgggtgatttcctacggggtgtccagctacggctacgacgtgcgctgcgccgccgaattcaaggtgttcaccaacatccattcggcggtggtcgatccgaagaacttcgacgagaaaagcttcgtcgacatcaacagcgacgtctgcatcatcccgccgaactccttcgccctggcgcgcaccgtcgagtacttccgcatcccgcgcgacgtcctgaccatctgcctgggcaagagcacctacgcgcgttgcggcatcatcgtcaacgtcaccccgctggagccggagtgggaaggccatgtgaccctcgagttctccaataccaccaacctgccggcgaagatctacgccaatgaaggcgtggcgcagatgctcttcctgcaatccgacgaggcctgcgaagtgtcctataaggaccgtggcggcaaataccagggccagcgcggcgtgaccctgccaaaagcctgacgccagagcgtttcgacaccggaaaccgggcctggcgcccggttttttcatgccttttccgccaacccctcgctgttccccgccggccgctctggcacgccttatcgcgggcgggcaggggcttatgcgcaggcggccgcccgtcctgtgaaatctggcagttaccgttagctttcgaattggctaaaaagtgttcatcggctacgcgtgaacacggacgccaatcgtttgcgcaggccgatctgcaagacccacacaagcccctcgcctgaaggggtacgcatccgccgtggctggtccgcgcggatggccgctgagttacttgtctgccgttcgaacaataagaacgaactctacgtaatgccgggatacccgtggcagcgatagctgtttgcctgttcgaaaatttttgggaggtgtgaaatgcggcgcgaaagtctgttggtatcggtttgcaagggcctgcgggtacatgtcgagcgcgttgggcaggatcccgggcgcagcacggtgatgctggtcaacggcgcgatggcgaccaccgcctcgttcgcccggacctgcaagtgcctggccgaacatttcaacgtggtgctgttcgacctgcccttcgccgggcagtcgcgtcagcacaacccgcagcgcgggttgatcaccaaggacgacgaggtggaaatcctcctggcgctgatcgagcgcttcgaggtcaatcacctggtctccgcgtcgtggggcggtatctccacgctgctggcgctgtcgcgcaatccgcgcggcatccgcagctcggtggtgatggcattcgcccctggactgaaccaggcgatgctcgactacgtcgggcgggcgcaggcgctgatcgagctggacgacaagtcggcgatcggccatctgctcaacgagaccgtcggcaaatacctgccgccgcgcctgaaagccagcaaccatcagcacatggcttcgctggccaccggcgaatacgagcaggcgcgctttcacatcgaccaggtgctggcgctcaacgatcggggctacctggcttgcctggagcggatccagagccacgtgcatttcatcaacggcagctgggacgaatacaccaccgccgaggacgcccgccagttccgcgactacctgccgcactgcagtttctcgcgggtggagggcaccgggcatttcctcgacctggagtccaagctggccgcggtacgcgtgcaccgcgccctgctcgagcacctgctgaagcaaccggagccgcagcgggcggaacgcgcggcgggattccacgagatggccatcggctacgcctgaacccttgacctgcgaagacccggcctggccgggctttgcggttgcataacgcacggagtagccccatgcacgccatcctcatcgccatcggctcggccggcgacgtatttcccttcatcggcctggcccggaccctgaaattgcgcgggcaccgcgtgagcctctgcaccatcccggtgtttcgcgacgcggtggagcagcacggcatcgcgttcgtcccgctgagcgacgaactgacctaccgccggaccatgggcgatccgcgcctgtgggaccccaagacgtccttcggcgtgctctggcaagccatcgccgggatgatcgagccggtctacgagtacgtctcggcgcagcgccatgacgacatcgtggtggtcggctcgctctgggcgctgggcgcacgcatcgctcacgagaagtacgggattccctacctgtccgcgcaggtctcgccatcgaccttgctgtcggcgcacctgccgccggtacaccccaagttcaacgtgcccgagcagatgccgctggcgatgcgcaagctgctctggcgctgcatcgagcgcttcaagctggatcgcacctgcgcgccggagatcaacgcggtgcgccgcaaggtcggcctggaaacgccggtgaagcgcatcttcacccaatggatgcattcgccgcagggcgtggtctgcctgttcccggcctggttcgcgccaccccagcaggattggccgcaacccctgcacatgaccggcttcccgctgttcgacggcagtatcccgggaaccccgctcgacgacgaactgcaacgctttctcgatcagggcaaccggccgctggtgttcacccagggctcgaccgaacacctgcagggcgacttctacgccatggccctgcgcgcgctggaacgcctcggcgcgcgtgggatattcctcaccggcgccggccaggaaccgctgcgcggcttgccgaaccacgtgctgcagcgcgcctacgcgccactgggagccttgctgccatcgtgcgccgggctggtccatccgggcggtatcggcgccatgagcctggccttggcggcgggggtgccgcaggtgctgctgccctgcgcccacgaccagttcgacaatgccgaacggctggtccggctcggctgcgggatgcgcctgggcgtgccgttgcgcgagcaggagttgcgcggggcgctgtggcgcttgctcgaggacccggccatggcggcggcctgtcggcgtttcatggaattgtcacaaccgcacagtatcgcttgcggtaaagcggcccaggtggtcgaacgttgtcatagggagggggatgcgcgatggctgaaggctgcgtcctgaacggtgctggcataacagatagggttgccatgattttgccgtatcggcaaggctgcgcgcttgacagcgtcataccccgggccaattctgctgtgatgcattttatcgatcagggcttactgcaatgaggaatgacggaggctttttgctgtggtgggacggtttgcgtagcgagatgcagccgatccacgacagccagggcgtgttcgccgtcctggaaaaggaagtgcggcgcctgggcttcgattactacgcctatggcgtgcgccatacgattcccttcacccggccgaagaccgaggtccatggcacctatcccaaggcctggctggagcgataccagatgcagaactacggggccgtggatccggcgatcctcaacggcctgcgctcctcggaaatggtggtctggagcgacagcctgttcgaccagagccggatgctctggaacgaggctcgcgattggggcctctgtgtcggcgcgaccttgccgatccgcgcgccgaacaatttgctcagcgtgctttccgtggcgcgcgaccagcagaacatctccagcttcgagcgcgaggaaatccgcctgcggctgcgttgcatgatcgagttgctgacccagaagctgaccgacctggagcatccgatgctgatgtccaacccggtctgcctgagccatcgcgaacgcgagatcctgcaatggaccgccgacggcaagagctccggggaaatcgccatcatcctgagcatctccgagagcacggtgaacttccaccacaagaacatccagaagaagttcgacgcgccgaacaagacgctggctgccgcctacgccgcggcgctgggcctcatctgatgcttagggcgcgccggctggcgcgccctaccagatctggcaggttgcctgccgttcatcctcctttagtcttccccctcatgtgtgtgctggtatgtcctccgactgagagggcccaggagtatcagggtagggatgccgcctttttttctcggccggcacgacacggggacttggtcatgatcgaattgctctctgaatcgctggaagggctttccgccgccatgatcgccgagctgggacgctaccggcatcaggtcttcatcgagaagctgggctgggacgtggtctccacctccagggtccgcgaccaggaattcgaccagttcgaccatccgcaaacccgctacatcgtcgccatgagccgccagggtatctgcggttgcgcccgcctgttgccgacgaccgacgcctacctgctcaaggaagtcttcgcctacctgtgcagcgaaaccccgcccagcgatccgtcggtatgggagctttcgcgctacgccgccagcgcggcggacgatccgcaactggcgatgaagatattctggtccagcctgcaatgcgcctggtacctgggcgccagttcggtggtggcggtgaccaccacggccatggagcgctatttcgttcgcaacggcgtgatcctccagcgcctcggcccgccgcagaaggtcaagggcgagacgctggtcgcgatcagcttcccggcctaccaggagcgcggcctggagatgctgctgcgctaccacccggaatggctgcagggcgtaccgctgtcgatggcggtgtgaggtcgtcagccgtttcgcgcacttttttccgcttctcctgccgcatgctcggcccgcgccccggcgtcatcgggcgttcccctgcattccgggatttggccgcggctgccgacttgcgtagtctctctgcggtccgccatcccgaggagtcgccatgccgaagtcattccgccatctcgtccaggccctggcctgccttgcgctgctggccagcgccagcctccaggcgcaggagagccgcctcgaccgcatcctcgagagcggcgtgctgcgcgtcgccaccactggcgactacaagcccttcagttaccgcacggaagagggcggctatgctggcttcgatgtggacatggcgcagcgcctggccgagagcctggggaccaagctggtagtggtgccgaccagttggccgaacctgatgcgcgatttcgccgacgaccgcttcgacatcgccatgagcggcatctcgatcaacctggagcgccagcgccaggcgtatttctcgattccctacctgcgcgacggcaagacgccgatcaccctctgtagcgaagaagcgcgtttccagaccctggagcagatcgaccagccgggcgtgacggccatcgtcaaccccggcggcaccaacgagaagttcgcccgggcgaacctgaagaaggcccggatcctggtgcatccggacaacgtgacgatcttccagcagatcgtcgacggcaaggccgacctgatgatgaccgacgccatcgaggcccgcctgcagtcgcgtctgcacccggaactctgcgccgtgcatccgcagcaacccttcgacttcgccgagaaggcctacctgctgccgcgcgacgaggccttcaagcgctacgtcgaccagtggctgcacatcgccgagcagagcggcttgttgcgccagcgcatggagcactggctcgaataccgctggcccaccgcgcacggcaagtaatacaggggcggcgagggtggccgcgggcccgcgcggccttccttggcggcggcaaaaacgttatggtcggcgccccatcctggtgcctggtccatgcgttatctactgttcgtcaccgtcctctgggcgttctccttcaacctgatcggcgagtacctcgccggccaggtcgacagctacttcgccgtgcttacccgggtccttctcgctggcctggtgtttctcccgctgacccgctggcgcggcgtcgaaccgcgtttcgtcggtggggtgatgctggtcggcgcgctgcagttcggcatcacctacgtctgcctgtacctgagcttcaacgtgctgacggtgcccgaggtgctgctgttcaccgtgctgacgccggtccacgtggccctgttcgacgacctgctcaaccgccgcttcaacttctgggccctggccgccgcgctggtggcggtgctgggcgcggcgatcatccgctacgacgggatcactggcgagttcctccagggcttcctgctgctgcaactggccaacgccaccttcgccgccggccaggtgctgtacaagcgcctggtgcgcaagtacccgtccgagctgccgcagcgccagcgcttcggttatttcttcgttggcgcgctgctggtggcgttgcctgcctggctgctgttcggcgatccgcagcgcctgccggccggcgagctgcaatggggcgtactggtatggatggggctgctggccaccgccctcggccagttctggtggaacaagggcgccaccgaggtggacgccggtaccctggcggtgatgaacaacctgcacgtgccggtcgggttgctgctcaacctgctgatctggaaccagcacgccgacctgccgcgcctggccctgggcggcgcggtgatcgtcgcttcgctgtgggtcaaccggctcggccggcgcgaggtgcgtgcatgaggatttccggacagggcgtgctgctgtcgctggccgcctcggtgctgttcgttaccctgccgggctacgtccacctgctggagccgctggacagcctgcaggtggtggcgcatcgggtggtctggtcgatcccgatggtattcctgctggtcgtcgccacccgccagtggccgaccctgcgcgccgcctggcgccggctgttcgccgagccctggctgctggcctgcttcccgctgaccgcggcgatgatgctgctgcaatggggcatcttcatctgggcgccgttggccgggaaaacccttgaactgtcgctgggctacttcctcctgccgctggcgatggtgctggtggggcgggtgttctacggcgagcgcctgacgccgctgcaggctatcgccgtggcctgcgcgctggccggggtgctccacgagttctggctgacccgcgcgttctcctgggtctccctggtcaccgcgctgggctatcccccatacttcatgctgcggcgcaggatgggcgtggacgcgctgtccgggttcgtcttcgagatgctcttcctgctgccgctggcgttggccgcgctgtactggctgggcgacgagagccaggccttccgcgaggcgccgcgcctgtggctgctgctgccgatgctggggctgatcagcgccctggccttcggcgcgatgatggcttccagccggctgctgccgatggggctgttcgggattctcagctacgtcgaaccggtgctgctgttcctggtggcggtactgttcctcggcgaggcgttccgtcccgagcagctatggacctacgcgccgatctggctggcggtgctgttgaccggctgggacagcgcgcgcctgctgaggaaacaggcgcggcggggcatctgagcgagccgcaggcgccggaatcagcgcttgcgggtgctttcgacctgggcgagggtggtcggcaggatgcgcttgccggccaggtagtggcgtttccagtagctgctgttgaggtcggagacgcggaccttcttgccgcgccgcggcgcatgcacgaagcggtcgttgccgacgtagatgccgacgtggtcgacgctgcggctgcggatccggaagaacaccaggtcgcccggttgcagcttgccgcgggagaccttgttgttgtccatgttgtagatggcgcgggcggtccgcggcaggtcgacgtcatcgacgtcctggaacacatagttgaccaggccgctgcaatcgaagcctttcttcggcgtggtgccgccccagcggtagggggtgccgatcatgctgaaggcgcggtcggtgacttcggaagcggcggccgcgaccaccgagcggttggcggactggcgggtgctgacgacccggctgggcgacagggtggaattcttcgacggcttgaaggtgtgggtgacctggttggaagccaggctgggcgtcgagagggcggccagaagggccgcgaagcctacagacaggcatgtcaaaaagggtgaacgcatttcggcatgtcttcgcgtgcgtgaataacggtccaggcttccgctggttcgtggttactctctgttcatcggagtgtcttctgggtgaccggaacgagccctcctgactcttccgaccaggccgtcaaacgaaacggccaactgcttccgggcctggatgcattcaggttgtcccggcgataacgggcttaacgaaggaaaatcggggactcatcggcgttcccagcgtattcccctacgaaagcggcggctattgtgacctattttgacgccggccttctgaccattcgtcgaatgatcggttccggatgtgacgcgccggtttcgccgtgcaagtggcgatacttgcgggtccggcaatgacctgttgttcgccgtggccttggaaagcctctgcgccgggggtatgttcgtgttccccgtacccgagtgaagcccgtagaagcgagtccagatatgaccgaaacagccaagcgtcccttgtacgttccccatgccggcccatcgctgctggagatgccgctgctgaacaaaggcagcgcgttcagtacccaggaacgcatcgatttcaacctgcagggcctgctgccgcacaacatcgagaccatcgaggagcagaccgagcgcgcctacagccagtacaacctgtgcaacaccgatctggaccgccacatcttcctgcgctcgatccaggacaacaacgagaccctgttcttccgcctgctcgaggagcacctggaagaaatgatgccgatcatctacacccccacggtcggccaggcctgccaggagttctcgaagatctaccggacccaccgcggcctgttcatctcctacccggaccgcgagcggatcgacgacatcctgcgcagcgccaccaagaacaacgtgaagatcgtggtggtcaccgacagcgagcggatcctcggcctcggcgaccagggcatcggcgggatgggcatcccgatcggcaagctgtcgctgtacaccgcctgcggcggtatcagcccggcctacaccctgccggtggtgctggacgtcggcaccaacaacccggacctgctcaacgacccgatgtacatgggctggcgccacgagcgggtgagcggggcgcagtacgaggagttcgtcgacctgttcatccaggcgatcaagcgccgctggcccaacgtcctgctgcaattcgaggacttcgcccagaccaatgccatgccgttgctggagcgctacaaggacgagctgtgctgcttcaacgacgacatccagggcaccgccgcggtggccgtgggcaccctgctggcggcttgcaaggccaagggcgagaagctcagcgagcagaccgtgaccttcgtcggcgccggctccgccggttgcggcatcgccgaacagatcatcgccgccatgcaactggagggcctggacgaggcccaggcgcgtcggcgcatcttcatggtcgaccgctggggcctgctcaccgacgacatgagcaacctgctcgacttccagcaccgcctggcgcagaagcgcgccgatctcggtgcctggggcggccagcagggcgacgacctggcgttgctggaagtgatccgcaatgcccggccgacggtgctgatcggcgtctccgggcagcgcgggctgttttccgaagaggtcatccgtgagctgcacagccattgcaagcagccgctggtgatgccgctgtccaacccgacctcgcgggtcgaggcgactccgcaggaaatcctcaactggaccgacggccaggcgctggtcgccaccggtagcccgttccaaccggtgcaggtgggcgacaagcggattcccatcgcccagtgcaacaacgcctatatcttccccggcatcggcctgggggtgatcgccgcgcgggccaaccgggtcaccgaaggcatgctgatggccgcggccaacgccctggccaactgctcgccgatcgttacccagggcgagggcgccgtgttgccggcgctgggcgacatccgcgaggtcagcaagcgcatcgccgtcgccgtggccaagcaggcccaggccgagggcaaggccctgcataccagcgacgaggtactgaacgacgccatcgaggcgaacttctggttcccgcgctaccgtgcctaccgccggacttcgttctgaggctctgccgcaggctgcgcacgggggagaggcgttaaccgccgatattccgcgcgatcggtgcgagaacgcgaaaaggccaccccgaggtggcctttttcgttgacggtagcgctagcgctcagcgcacatgatcggggcgcgtccggtgttcggcctgggtttccgggttttccgccgcgcgccgcgccagggccggcaggacatgatcgcgcagcagcggcgcgagattgtccggctgcgcttggccggggaccagccaggccagttcctccagctccgcctgcgcacagacggcgtggggcaagcgggcgacgtagatatcggcatcgacgcgggtgttcgcctcgttggccgccggcgcctggaagctgccgaggtgctcgaaggtcgaggcgcccatcggcaggcgcagttcctccagcagttcgcgctgtagcgcggcgaggggcgtttcgcccggctcgcgcttgccgcccgggagcatgaaggcctgggtgccgcgcttgcgcaccagcaacaggttgccctggtcgtcgaacaggcaggcggcggaaatgctcagcaggttgtcggtcattgcgggtcgtcctcggcgatcacctggtagcgcatctgtacgatgccgctgttgtagccatgttgttccagcagttgcaggcgccgctcgcggccgccggcgaacagcgggatgccggcgccgagcagctgcggaatgacgctgacgatcacctcgtcgagcagcccggccgccaggcaactaccggcgaggctgccgccgccggccagccagacccgccggcagccctgttcgccgaggcgtgcgaggccttcctggggcgtgccatggcgcaactcgacgccttccaccgcgctctcccggggattgcgggtgagcacctggcagggcttgcccggatacggccagtcgccgaagccgcgcacgatatcgtaggtgccgcggcccatcagcagcccgtcgatgccctggtagaagccgttgtagccatggtcgttgccgccctcggcgaaacggtcgagccagtcgacgctaccgtcgggacgggcgatgaagccgtccaggctggtggcgacgtagtagatcaggtgcggtttcatggacggcgctcccctcgcttcagacagtggcttcgtcgctgcggctcggtgcggccaacgcctcgaacgaacgggcctcggcgtcacgcccttcgagcatgccctgcagcccctggcgcaggtcctggccgctgggctgctggtaggcgccgaggccgaactccggcatcaccgccagcaggtagtcgaacacgtcgccctggatgcgctcgtagtcgacccaggcggtggtgcgggtgaagcagtatatctccagcgggatgccctgggcggtcggctgcaactggcggaccatgcaggtcatgtgcggatggatgtccggatggttctgcaggtaggcgagggcgtaggcgcggaacgtaccgatgttggtcagccggcggcggttggcggccagcggggcgaccccgccgttggcggcattccactcctgcaactcggtctgcttgcgggccatgtattcggtgagcaggcgcacctggctcaggcgccgctcttccttctcgtcgaggaaacgcacctggctggagtcgacgtagatcgcccgcttgatccgccgtccgccggactgctgcatgccgcgccagttcttgaacgactccgacatcaggcgccaggtcggcaccgagacgatggtcttgtcgaagttctgcaccttcacggtgtacagggtgatgtccaccacgtcgccgtcggcgccgacctgcggcatctcgatccagtcgccgactcgcagcatgtcgttgctggtgagctgcacgctggcgacgaaggacatcagggtgtccttgtagaccagcaggaggaccgccgacatcgcgccgaggccggacagcagcaggagcggcgagcggtcgatgatgatcgagacgatgatgatcgcgccgaacacgaacacggcgatcttcgccagttgcacgtagcccttgatcgagcgggtgcgggcgtgctcggtacgcgcgtagatgtccagcagggcattcagcagcgctgtgagggcgaggatcaggaacagcacggtgaaggccagtgccaggttgccgaggaagtgcgcggccttgtccggcatctccgggatccatggcaggccgaattgcaccagcagcgagggcgtggtctgcgccaggcgctggaacaccttgttgcggatcaggtcgccgagccagtgcagcgcgggctggcgggcgagcaggttggcggcgtagaggacgatgtagcgggccacccggccgaggatcagggcgcccaccagcagcaggccgaaggccaggccggcgtgcaggatagggtgttggtcgagcgccgaccagtacccggagagctggtcgagaagggatgtggagtccatggacaggcgacttcctttgttgcgggcggggggacgggccggccccgcggttgaacggagatcccgacgcgggggccaggaacgcacaaaggaaccaagagtgccccatcgggcgccggatcgcatccccgacgtgtctacaaaggttttccgccgacgcgcgggctcagccggcaagctcctccagggtgcgcccgcgggtctcgatgccgaaggcccagaccaccagggcggcgacgccgaaacagagggcgccgagggtgaacaccccgccctggccggtgagcggcaggaccagcccggtgaccagcgggccgagcagcgagccgatccgcccgaccgccgaggcgaagcccgagccggtggcgcgcgcggaggtcggatagagttccggggtataggtgtagagcaccgcccacatgccgaacaggaagaactgcatggccaggccgaagccgatcagcagcgccaggctgccgccgaacaccgcggtctggccgtaggcgtaggccatcgcgccgccgccgaggagcatcagcacgcagctcggcttgcggccccagctttccaccagccaggccgcgcagaggaagccgggtatcccggccagcgaaatcagcaccgtgtagtacaccgactgggtgacggcgaagccggattgctggagcagcgcgctgagccaggaggtcaggccgtagaaaccgagcagggcgaagaaccacaggccccagacggtcagggtgcggcgccggtaggctggcgaccagagttcggcgaaggcgctgaagaagcccggacggctgcgttcccgctgcggctggcgcagcggcggcggcagctcggtcaggcccagcgaacgcatcacccgtgcttctatgtcgcgcaatacccggtccgcctgttcgcgccggccggcctgctccagccagcgcggcgactcgggaatcaggaagcggatggcgaggacgaacaccgccggcagcgccagcaccaggaaaatgctgcgccagccggtcagcggcagcaggaagtaggacaggcagccggcagcgacgaagcccagcggccagaagccgtccatcagcgcaatgtacttgccgcggcggctggccgggatcatctccgacagcagcgactgggcgatgggaaactccatccccatgccgatccccagcaatacccggtagaaggtcaggctgtcgaggtcgccggcggtggagcacaggtagctggccaggccccagagcacgatgctggcctggaataccggcttgcgcccgaagcggtcggcgagcatgcccgacagggccgcgccgatcaccatgccgaagaagctcgagctggccagcagcccggcctgcgccgagtcgagcccgaactcggctttgatcgagccgagcaggaaggtcatcatcgccaggtccatcgagtcgaagaagaacgccagcgcgatgatcacgaagaccagtcggtgatatggactcagcggcagccgttcgaggcgttcggcggcggatgcgggcgcgtcgggcatgacctggttcctctgggcggcgggcgtcgaacgagtctgcgatcgccgcccgcgccgtgcttgcctggcggcgacccggcgtcgagccgattgcgacgccggcactggccgtcgtgccgcgcgaataaagcctgcgcgccggcgcggcaaccgttaggctatgcacctgtccattttcacgtgcaatgccgaggtctcccttgttcagccaatttcccctccacgaacgcctgctgaaggcactggaaagcctgtccttcagcgagccgacgccggtccaggccgcggccattcccaaggcgctggaggggcacgacctgcgggtcacggcgcagaccggcagcggcaagaccgcggccttcctgctgccgctgctgcaccgcctgctggccgaggacaagccgcgctccctggcgcgcgcgctgatcctcctgccgacccgcgagctggcccagcagaccctcaaggaagtcgagcgcttcgcccagttcaccttcatcaaggcctgcctgatcactggtggcgaggacttcaaggtgcagggcgcgcgcctgcgcaagaacccggagatcatcatcggcacccccggccgcctgctcgagcagcgcaacgccggcaacctgccgttgcaggacatcgaggtgctggtgctggacgaggccgaccgcatgctcgacatgggcttcgccgacgacgtgctggccctggccaatgcctgcccggccgagcgccagaccctgctgttctccgccacccacagcggcgccgggttgaacaaggtgatcgccgaggtgctgcgcgagccgcaagtgctgcgcctgaaccaggtcggcgagctgaacgagaatgtccgccagcaggtcatcaccgccgacgacgtggcgcacaaggaacagttgctgcaatggctgctgagcaacgagacctacaccaaggccatcgtcttcaccaatacccgggtctccgccgatcgcctgaccgggcggctgatcgccaaccagcacaaggtcttcgtcctgcatggcgagaaggaccagaaggaccgcaagctggccatcgagcgcctgaagcagggcgcggtgaagatcctcgtcgccaccgacgtcgccgcacgcggcctggacgtcgaaggcctggacctggtgatcaactttgacatgccgcgcagcggcgacgagtacgtgcaccgcatcggccggaccggtcgcgccggcgccgagggcctggcgatctcgctgatctgccatggcgactggaacctgatgtcgagcgtcgaacgctacctcaagcagaacttcgaacgacgcaacatcaaggaactgaaggccgcctaccaggggccgaagaaactcaaggcgtcgggcaaggccgccggcagcaagaagaaaaagcaggacaggaagggcgccgccgccaagcccgcggccaagcgcaagcccgccgcgcggccgaaggccgggccgtcggcggtggtcagcgccgacggcatggcgccgctcaagcgcaagaagccgacggcggagtgatcgcgcgccgccgaccgcttcggagggcggataaccgtttgctgttatccgccgcgccggcgttggatggcggataacgccgctggcgctgtccgccccgggggactgcctggccccgttctcagctccccgccgtcgcgcccgcctcgtcgttggccggcggcgtggcgctcttcaccagcggcgtatcgtagctgctggcctcgtagctcacgcaatggcggatctgcggcggaccgtcgccggcatgcagggcggtgacgttgtcgatgacgatcttgtcggccagggtcatgcggtcgagcatgcgcaggtgctggatccagttgtccaccaggaacagttcctgccagacctccgggttgctcacgtcgcggaacagcgaccagcgctccgcgccgttgcgcaggcgcaggcggcgcagcggctgggcggcgcgaacgaagtcgcgggtgcgctcggcgggaatccggtattcgatggagaccagcaccatgccccgccgcgtgttgaagacgaagctcggctgcccgggcatgctcgccggcgcgcgggaaatactggcggcgtccatttccggcaggcgcgagttgtacaggaggatcaccgaggccagcagcaggcagccggcggccagcagcgcgccgtgcacggtcatggtctcggcgagatggccccagaggaacgaacccagcgccaggccaccgtacagcgcggtctggtacagcgccagggcgcgcgccttgatccagtcggggacgaggatctgcaccgccgagttgtaggtggcgagggcgccgatccagcagccgccaccgaggatcagcaccgggaacaggacccagaggttgtccaccaggccgagggtcagcaggatcagcgccagggtgaagccggccaggctgatcagccggctgctgccgatccgctggcgcagacgcgagacctgggtgctgccgaggatcgcgccgaggccgagggcgccgagcatgtagccgtagatcgccgcgtcgccgtccgggttgcggtgcgccagcagcggcagcagggcccagaccgcgctggcggagaggccgaaggcgaaggagcgcatcatcaccaggcgggtgacggttgagtactgggtgaagcgcagcgccgcggtgacgccttcgaggatgccttccggcggcaggctgcgcttgggcacgtcgcgccgccactgccagatcgcccagatcagggccatgtagcagaagctgttgaacaggaacacccaggccggtcccaccgcgctcagcagcaggccgccgagggccgggccggcggcgcgggcgacgttgtagttgacgctgttgagcagcaccgcgtcgctgaccatgcgcgccggcacctgctcgttgaccgccgcctgccaggccgggatggtcaccgagccgccgagggagatccagaggatggagatgatcagcagcaccgggtcgaggtagccgaggaaggccagcagggtggcgaacatcgctccggtcatctcgaagctgagcccccagagcatgatcttgcgccggtcgtggttgtcggcgatgaccccggagaggatcgacagcagcaccagcggcagtgccgcggcgacctggatcatcgccaccatcagcgggctggcgtgggcgtcggtgaccacccaggcggcggccaccgactgggcccaggtgccgaggttggcgaacaggttgcagatccagatgatgcggaaggcctggatcgagaacggcgcccaggtgccggtgcgttctggcttggccgcttggccttcgggtttgaggggcaggtcgtgcttgggcgaaacggactggagcatcagatgggtgccttgtatcagcgtgcctgatgtcgggaaagtctagccgcctggcgcctgggcgccattgatggcggtcatggggccggcccggcgtggatagacattggtccgatggcgctatcggagagttccgatgtccaggcaggacagtgccctgggtgtcccgcattggtaggcttgccggcaccgagtcgagacaagagcgaaaagccgatgaagttgctgttgcgttgcctgctgctgggggcgtggggcgtctcgccgagcctgtgggcctggtccaaccatacggtgggcagctacctggcattgcgcgagctggcggccatccgcgaggcgccggaagtcgaggtggagtcgctggaggcgttcctcgccgccgagcgcggcggactggccgccctgctggacgagcaggaagcctacgcccgagcgcatatcggcaactacccggcgcgtccggacgccctgcgcttcgctgccgagggcgaggccggcgacttgcgtcaggcgttcctcgcggcgctgcgggtcaacccggagatccgcctggcgctggcgctccagccgcttcccgggcaggaccagccgcagcgcccgcacctcaagccacaggaggtgctggtgttccagaacctctcgccgtggaccgcttggcgtttcatccgcctggagcccggcgagcgagtcgcgcccctggcagtgctggccaccgccgccgacgaaccggactacggccacgacatcaacctgttcagcgacaaccccggcgaagccggccagcgctacggcttcggcacccagccattcggcgacccgcgcttcgagttcagctcccaggcgccgttccacatgggcttctatcacgaggcggcggtgatctacagcggcgcgccgttcctcgcccgggcctggccggaatggcgtgcctaccagtacttcggcctgtcccgcttcgccttcgccaacggtcatccctactggggctaccggttccttggctggggcatgcactacatccaggacatcacccagccctaccactccacgccgctgcccggtgccagcctggcggcgatgctacagatggagggcaaggcattgctcggctacccggaggaaaaacaggcggccatcgagcgtgtcgcgaaccgccataccgcggtggagaaataccagttcgactggctgcgccaactgctccgcgacggccgcccgcagccgatgctcgacgcctacgccgacacccgccgcgacggtgcctatccggcctattcgccgacctacttgcgcgaggtggtggccgccgagtcgaacgcccacgccgcggccttcgacgccgccatcggcgaatggctggccgcccgcccggcctccgccgcgcaggacttcagcgagagcaaccagccacgccccgaggcccacgacaatgcggggctgaacgcgcaactgatcgaactgatcgggcatttcggcgcgcatagccggaacatcgccagggcggcgttggagacggaggagggtggggcgaaggagtgagggggcggcggataagcggcggataaccgcgagcggttattcgccctacggagcgggggcactgtccggcgtttccggggcgtgtagggcggataacgccatgggcgttatccgccgatgtcgcggatgagcggcggatgaccgcgagcggctattcgccctgcggagctggggcgcagtccggcgtttccggggtgtgcagggcggcgaacccgccccgccaggcggggcgatgccgagacttagtcgcgcaacagctccgcaggcacctcgctgcgcaacatcaactggcactgctggctctccgggtcgaacaggatcaccgcctcgccccgccgcaaggcatgccgggcgcgttctacacgcacgtccagcggggtctcgtcgccattgtcggtgccttcgcgggtgacgaagtcttccagcaggttgttcagggtgtcggcttcgagcaggtcgtgggggatcagcatggcggtactccggtatggcggcgaatgctagcgcgacgcatcgcgtactgtcatgcctgtcgcgaaggctggccgagcaggcgttcgagggtggcatagagttccgcccggtccaccggcttgccgaggtaggcgtccatgccggcctcgattccggcccggcggtgttcgtcgaggatgtgcgcggtcagggcgacgatcggtacgcgtggccagccctgggcacgctcctcccggcggatcaggcgggtcgcctcgaagccgtccatttccggcatctcgccatccatcaggatcaactggatgccgttcggatcgcgcaggtactcgtccagcgcgagccgtccgttgccggccaggcgcaccgcgtagccgcgcttggcgaggaagccgcgcaccaccagctggttcaccgggttgtcctcggcgaccaggatgcatggggcgtccaggcgttcgtccggggccgcctcgctgctccgccctggctgtcggcgccgctcccggtacagttccagcagggcttcgcgcagggccttcaccgccaccggctgggccagggccagcaggcgcaggccttcgtgcggcggcaggtcctggcagtgctgcggcgggcatagcaggaggatgcgctggccttgctccagttgcgcatagagggtgtccagccagatcgacggcggccccggccagggcgccgccaggaccagcaggggcggtgcgctgaagtcctccaggtaggcgttcagccgtctcggctgcaggcagcgttcgacccgcagtccccaacgctccagcaatgcctgcaggcagtccagggtcaggttgtcctcgctggccagcagggccgggcggtgttgcagcagttgcgccagttcgtccgcttcgccggcgtcgagggcggggctgagcggcaggtcgacgctgaaccgggtgcccttgcccggctcgctgctcacctcgatgcgcccgcccatcatctgcaccagctcgcggctgatcgccaggcccaggccgctgccgccgtagcggcgggtggtgctggagtcggcctgggagaaggattcgaacagggtcttctgcgcctgggcggatatcccgatgccgctgtcgctgacgctgtacagcaggcgctcgcgtccgccctcgtcgaagcgccgctgcacgcgcacggcgacatggccttcggcggtgaacttgagggcattgctgagcaggttcatcagtacctggcgtaaccgcgtcgggtcgccgttgaggcggcgcggcacgcccctgtccaggccgagatgcaggcgcaggcgtttttccacggcctgggcgctgaacagcgccagggtgtcggagagcagttcctccaggtcgaagtcgatgcgctccaggtgcagcttgccggactcgatgcgagcgtagtcgaggatatcgttgatcaccgacatcagcgcgctgccggagctggcgatggtctccacgtaggccgcctggccgcggtccagcggggtgtcgcggagcagttgcagcatgcccagcacgccgttcagcggggtgcgaatctcatggctcatcttcgccaggaagcggctcttcgcctcgttctctacccgcgcctgctcggccgcctggcgcgagcggaagccttcctccttgagcgcattgatgcggtcggcgaggccgatggacagggtcaccagttccacggtcatgccgatcttgaccacgctgctgccgaacaggccgaacagttcgaagcccagcgaggcggcggtggtgaccaggaacgacagcagcagcgcgccccaggccaggatgtagtagaggccgtagcgcaggccctggcgccagacgtggacgccggccagcagcaggctgagggacaccagcatcaccgtcaggctggcgaggacgttccaggcgcgcagccccaccagcggctcgctggccaacaggaccacgcaggccagcagcaggccgcggaggaagcggtcgaggcgcgggaagtcgcggcgggtgtagaggtagccgcggctgaactggatcgacaccaggcagctcaggtacatcagcaggtagatgccggccgactccagcgccacgtgtccgggcagcaacttgaacagcaggccgtcgaagctggcggaaaacaggccgaggctgaggttgtacagcaggtaccaggcataggtggcctcgcgtagcgagacgaagaggaacaggttgtagcagaacaacccgaacagcaccccgtagaaggccccgttgaagcccatcagggtttcctggctggccgcgctggccgcgtaggtgctgaagtacagcggcacgtagacggtgctggtgctctgcacgcgcagcagcagggtgctctcgccgggcggcagtcgcagcgggaaccagaagttgcgcacttgcaccgggcgctgggagaaggcgaacaggtcgccgctctcctgctgttcgatgcgcccatcggcggtcagcaggtagaccttgaggtcgtccagcagcgggtagttgatctccaggaaaccggccaggtcggtgccgttgcggttgtccaggcgcaccctgaaccaccaggccgcggcgttcttgccgaagttcgcgtggtcgccgcgcagggcggcgaaggcctgcgccggcaaggcgaggatgtcgcccaggcgcgccttgccgccggcgtcgcggtagtactcggcgtatgcgcccagggacaggcgcaggtcctctccgtccagcggcgcgggcggctgcgcccgggccggcagcgcgcagcagagcaacagcaggaccaggcagagtcgggacatgcaactactccatggacacgagtcggcacgcatgatgctacggaggaaacgagacaggcgagggaacctgccatcagcctagcagttggctggagaggagggcggcctccccgggggcggggaggccggcgcgggttcagtccttgtcgctgttgttgctgctgtcgagcacttcgtccaccggcgggacgtgggtgcagctttccatgtgcaccggatgctcgagctgcttgttgaagcgttccagcgaggtttcccggggcttggcgtcgctggcgaagaccggcgggctgaggatgtaggcggtgagcagccggctcagcgcggcgaggctgtcgatgtgcgtgcgctcgtagccgtgggtggcgtcgcagccgaacgccagcagcgcggcgcgggtgtcgtggccggcggcgatcgccgactgcgcgtcgctgtggtagtagcggaacaggtcgcggcgcagggcgatgtcgtggcgctcgccgagccgcagcaggtgccgcgacagatggaagtcgtagggcccgccggagtcctgcatggccacgctgacgctgtgctcgttggaattctggccttcggccaccggggcgatgtcgatgccgacgaactcgctgacgtcccagggcagggcgccggcggcgccggagccgacttcctcggtgatggtgaacagcgggtggcagtcgatcggcggctcctggccgctttccttgaccgccttcagcgccgccagcagcgccgcgaccccggccttgtcgtccaggtggcgggcgctgatatggccgctctcggtgaactccggcagcggatcgaaggccacgtagtcacccaccgagatgcccaggctctcgctgtcggcgcgactggcggtataggcgtcgagacgcagctcgatgttgtcccaactgatcttcaggttgtccacctcggtattgaaggcgtggcccgaagccagcagcggcagcacgctgccacggaacacgccctgttcggtgaacaccgtgacccggctaccctcggcgaagcggctcgaccagcagcctaccggggccaggccgaggcggccgttgggcttgatctcgcggaccagcgcgccgatcgtgtcgaggtgcgcggaaaccgcacggtccggggtattcaggcggccctggagggtcgcccggatggttccccggcgagtcatctcgaagggcacgccaagttcgtcgagctgctcggcgacatagcgcacgatggtatcggtgaagccggtggggctggggatggcgagcatctccagcagcacccgttgcaggtagttgaggtccggttgtggcagaggggtcatgaaggcacctcgcggctgagggggaagagaagatcgacgaagcgttcggcggtcggctgcggctcgtggttggccaggccggcgcgctcgttggcttcgatgatcacgtagtcgggctggtcggcggcctcgaccaggaagtccaggcccaccaccggtatttccagggcccgcgcggcctggatcgcggcctcgcggagggccggatggagggcgtcggtgacgtcctcgaggatgccgccggtgtgcaggttggcggtgcgccgcacggccaggtgttcgccgctgggcaacacgtcgtcgtagccatagccggcggcccgcagggtgcgctcggtctcgtggtcgagcgggatgcggctttccccgccggtggcggcctggcgccggcggctctgcgcctcgatcagctcgcggatgctgtgccggccgtcgccgatcaccgcggcgggacgacggatggcggcggccaccacctcgtagccaatcaccagcacgcgcaggtcgtggccggcgtggtagctctccagcagcacgcgcgaatcgaaatggcgggcggcctcgatggcctcctcgacctcttccgcggtgcgcaggtccaccgccacgccctggccctgctcgccgtccaccggcttgaccaccagcgaaccgtgctcggcgaggaacgcggcgttttcctccgcgctgccggccaggcgctgctgtggctggcgcaggccggcgtgctgcagggcgcggtgggtgaggaccttgtcctggcagagggtcatgcttaccgccgtggtcaggtcggagagcgattcacggcagcggatctgccggccgccctgggtcagggtgaacaggccgccctcggcgtcgtcgacgcgcacctcgatgccgcgccggtgggcttcgtcgacgatgatccgggcgtaggggttgaggtcttcctccgggccggggccgaggaacagcgactggttgatgccgttcttgcgcttgatggtgaaggtcgccagttcgcggaagccgagcttgcggtagagcgccttggcctgctggttgttgtgcagcaccgagaggtcgaggtaagccagttcgcggctcatgaagtgctcgaccaggtgccgtaccagcgcctcgccgacgcccggccggctgcattgcgggtccaccgccaggcaccagaggctggagccgccctccggatcctggaacgccttggcgtggttgaggcccatcaccgtgcctaccgcgacgccagtgtcggcgtcctcggccagccagtagatcggcccgccctggtgtcgcgggctgaggcgctcggtctgcaccggaagcatgccgcgcgccaggtacaggcggttgatcgccgcccagtcctcctcggtatgcacccggcggatgcggaaaccgcgtggcggacggcgcgccgggcggtagtcggtgaaccacaggcgcagggtatccgagggatcgaggaagagctgctgcggggcgtgggccaggacctgctgcggcgccgccacgtagagcgcgatgtcgcgttcgccgggggcttcctgcaacaggtcgcgggccagttcctcggcgtccgggtaggtctgcccgatcagcaggcggccccagccgcagtggatgctcagcggtttctcggtgggctcgctgtgatcttcggcgagacgcgcctggaggcgttcgtaggtgggcgcctggatacgttgcaggcgctggttgtgcgggtgaggcagatgcaagtggcctttcatgatcgctcctggttcgggcccctgcgttgggggcccattttcaaagtccctgttcgctgagccagaggttgagggcggccagctgccacagcttggagccgcgcagcggtgtgaggtcgccgtccggatcgctcagcaggcgatcgaatgtcgccggctggaacaggccgcggtcctggctcgggtcgagcagcagttcgcgtacccattcgcgggtgcggccctgcaagtgcttgaggccgggcaccgggaagtagcccttgggccggtcgatgacttcgctgggaatcaccttgcgcgcggcacccttgagcacctgcttgccgccgtcgccgagcttgaagcgggcgggaatgcgcgccgacagctcggccaggcggtagtcgaggaacggcacgcgggcttccaggccccaggccatggtcatgttgtcgacccgcttgaccgggtcgtcgaccagcatgatcgtgctatccaggcgcagcgccttgtccaccgcggcctcggcgccggggctggcgaagtggtcgcggacgaagcgcccggcgacgtcctcgacgcggaagcgctcgccgacggtggccaggtattcctcgtggtcgcggtcgaagaacgccgcgcggtacgcggcgaaggcgtcgtcggcgccatccaccttcggataccagtggtagccggcgaacagctcgtcggcgccctggccgctctgcaccaccttgcagtgcttcgagacttcccgcgcgagcaggtagaaggcgatgcagtcgtggctgaccatcggctcgctcatggcgcggaaggccgccggcaactgctcgatcacttcgtgctcgccgatgcgcaggcgatggtgacgggtgtgatagcgctcggcgatcaggtcggaatactggaactcgtcgccgcgctcgccgccggcatcctcgaagccgatggagaaggtcagcaggttgtccaccccggcttcgtgcagcaggcccaccagcaggctcgaatcgaccccgccggagagcagcacaccgacctcgcgggcggcgcgctggcggatcgccaccgcttcgcggaggccgtcgaggacgcgcccctgccagtcgtcgagcgtcagctcgcgctcgtccgggcgtgggccgtagtccagcgtccaccaggtgcgctgctcgcagctgccgtcgaggtcgacgctcatccaggtcgccggcggcagcttcttcacgccctccagcaaggtgtgcggggcgggaaccacggcgtggaagttgaggtagaaattcagcgcctgcggatcgaggtcgctggcgatgtcgccgcccttgagcagggccggcaggctcgaggcgaagcgtaggcgcgagcggtcgaggctgtagtagagcggcttgatgccgagtcggtcacgggccaggaacagccgctggcgatcgcgctcccagacggcgaaggcgaacatcccattgagccggggcaataaatcggcgccccaggcatggtaccccttcaagagaacttcggtgtcgccgccggagaagaaccgatagccaaggctttccagttcgccacgcagttcggggtagttgtagatggcgccattgaacaccatggccaggccgagatcgggatcgatcatcggttggccggaagcttccgccaggtccatgatcttcagccgtcgatgtccgagggcgatcggaccctgggcgtggaagccccaggcgtcggggccgcgaggggccaggtggtgggtgatgcgttcgaccgctgcgaggtcggctgcctggttgtcgaaacgaaactctcctgatatgccgcacatattccttaccggttctccgttggggaagtgggttgcgtaccccttccgggtacatgacttacctaacagaggaccgttacagttggaaggagttctatacgaattttccgggcctatcaggacccttaacgaagaatttattatggttgaaagtaataagaccgctgccgatacctattcgctcgctattttccgcgccatccgccgtctccagcaggccgccgaaatccactccaagcgtctcagccgatacggtggcctgaccccgctgcaattgctgatcctgcatgtcctggcggtggagggagaactgaccgcgacgcaactggccaagctggtcagcctgtcccaggcatcgctctccggcgtgctcgaccgcctcgaaggacgcggcctgctctatcgtcggcgcgacgaacaggaccggcgcaagtcctggctgcacctcgacccggccggccacgaagccctggcggaggcgccgccgctattgccggagtacgtgatcgagcgcttcgccgcgttgcccgagtgggagcgccacggcttgctggccgcgctgctgcgcgcggccgacctgttcggcttgccggaagaggacgtcgaagaagagtgagggcgccaggttcgctacgaaagacagtcgcgtcggcggtctttacctggcgaacctgccgatgcctggtggacaagcgcgttgtacgccatggcgtgacctccgcgtagggcggataacgccgtcggcgttatccgccgacccagcgatatccgccagacgacatggcatgaccgtcgagcagggcgcataacgccgcttccccggtgccccggccgccgaggaaagctacccgccgtagagcttctgcgccgccagggagaagctcaccgccaccagcatcagcgcgaacaggcgttgcagggtcgggccgccgaggcgctgcgccagcaggttgccgccgagcacgccgaccgcgccgccggcggcgaggccgccgagcagcggcagcggcgggtgggcgccggtcaggtagatcaggaagccgccgccggagaccagcgcgatcaccgccatcgaggtggcggtggcggccatcatcgacagcggggtgaaccagagtagccccggcaccaccaggaagccgccgcccacgcccatcaatcccgacagcaagccgaccgccaggccgatgccgagcagcggcaggctccgtgcctggtcgctggcctcgcgtttcatcccggcgccgcgccacatgcgccaggccgaccagagcaccagcaggcagaaggcgacgatcagcacgccttccgggacgaagcggccgagccattggccgacggcgttgctcggcaggccggccagcgccaggaccagcaccggccgccaggccacctggccctggcgcgcgcgcggaatggcgccaatcagcgccgacagggcgaccgcgccgaggctcacgccgatggcgtcgcgcagcggcaggtgcaggctgagcagcaggggcagggcgaccagcgagccgccggcgccggtgaggccgagcagcaggccgagaacggcgccgatgcccagggattcgaagagcagtacatccatcgtcgatcaactatttccgcgggtgagccagccggtggtccggtatggcctgcgcgtgcggcaggcccgaagggtagcgcaaatcggtgcgcccggggcttcagccgcgctgcccgcgcaccaggtcgcgcagcaggaagcggttcgggtggcaggcctcggccaccgcgcgcggcagcggcagcggctcgccgcagatccacgccgccagcagttcgccggacagcggcgcgctgatcagcccgcgcgagccgtggccgctgttcaggtacaggcctggcagccaggggcaggcacgctccggcacctggcgggcgtcgcgggcgagcaccgcgtaggcctcgtcgaaggccgcgcgctcggccagcgggcctaccaggggcaggtagtcggggctggtgcagcggaatgccgcgcggccttccaggcgctccagcggcaggtcgtcggcgcccaggcgctgcaacaggtcgggggatatttcccgcagcagttcgaggttgccctggtgttcggcgagggtcggcgccaggtcttcgctcttgaagtcgaagctggcgccgagggtgtgttcgtcgccacgcggcggtgcgacgtagccctcggcgcagaccacggtgcgcagcgcccggctttgcggggtggccggcaggcgggtgacctgcccgcgaatgcgcttcagcggcagctcggcggcgggcgggaagtcgcggatgtcggcggcggtggcgaggatcgcgagtggcgcgcgggccaggcattcgtcgccggcgtaggcgcaccagtcgtcgccctcgcggcgcaagcgtactgcccggccgcttagcagggtgatcccgggggtggcggccagggcctggcacagcgcgggcggatggacccagccggcttcgggatagaacaggccgccggcgggcagggcgacgccggcgaggcgctcggcctgctcgcgctccaggccgtgcagcaggtcggcggggaaggctgcggccagttgcgcctggcgttgcgcttccttggcgtcgaaggccagttgcagtacgccgcaggcgtcccagtcgtggccgagccgcaggcgttcgagcagccggcgggtatggccgaagccgctgagcaccaggcgcgacagcggcgtgccgtgggccgagagtttcaggtagagcacgccctgggggttgcccgaggcttcccgggcgaggccgggatggcgttcgatcagggtcacctgccagccgcgcgcggcgaggctggcggcgctggcgcagccggccaggccgccgccgaccaccagtgccgcgcggcgcccggcgtggggcgcggggcgtgcgtaccagggcttgccggcgttcgccggcggcccctggtaggtgccgctgagcatctcgcgcttctgtccgtagcccggtacccgttgcatggcgaaaccggcctcgaccagcccgcggcggacgaaaccggcgctggtgaaggtgcccagggtcgcctgcggcgccgacagtcgcgccagttcggcgaacagtacgggcgaccacatgtccgggttcttcgccggggcgaagccatcgaggaaccaggcgtcgacccgcgcgtcgagctgcggcaggcactccagggcatcgcccagcagtagggtcaggccgacccttccgcccgcgaacgccaggcgctggaagcccgggtgcacggcaaggtactggcccagcagggcctcgctccagggcgccagttccggccatagcgccagggcgcggcgcaggtcggcggcggcgagggggaatttctccacgctgacgaactccaggcgcgcgccggccggcgcgacccgctcgaacagctgccaggcgcagaggaagttcagtccggtgccgaagccggtctcgccaatgcacagcacctcgccgtcgcccagcgcggcgaagcgctcggccaggcggttggtggcgaggaacacatggcgcgtctcgttgagcccggaatgccgggaaaaatatacgtcgccgaaggcgcgggatagcggctggccgttttcgtcccagtcgagctgggcatgctggaagtcggacatgggagaacctgaaaaagcggatggcgcattttacggggctttgccggccagcggcgaggcgctgcgcgaacatgccgcggcgccgcgcagacagccgcacgccgatccgctaccttgaaggactcaggttaagggagacctccatgttcgaatccgcggaagttggccacagcatcgacaaggacacctacgagaaggccgtcatcgagttgcgcgaagcgctgctcgaggcgcagttcgagctcaagcagcaggcgcgcttcccggtgatcatcctgatcaacggcatcgagggcgccggcaagggggagacggtcaagctcctcaacgagtggatggacccgcgcctgatcgaagtgcagagcttcctccgtccctccgacgaggaactggagcggccgccgcagtggcgcttctggcggcgcctgccgcccaaggggcggaccggtatcttcttcggcaactggtacagccagatgctctacgcgcgggtcgaggggcatatcaaggaggccaagctggatcaggccatcgatgccgccgaacgcttcgagcgcatgctctgcgacgaaggcgcgctgctcttcaagttctggttccacctctccaagaaacagctcaaggaacgcctcaaggcgctggaaaaggacccgcagcacagctggaagctcagtccgctggactggaagcagagcgaggtctacgaccgcttcgtgcattacggcgagcgcgtgctgcgccgcaccagccgggactacgcgccctggtacgtggtggaaggcgtggacgagcgctaccgcgccctgaccgtcggtcgcatcctcctcgaagggttgcaggccgcgctggccaccaaggagcgcgccaagcgccagccgcacgccgcgccgctggtgtcgagcctggacaaccgcggcctgctggactccctggacctgggccagtacctggacaaggacgcctacaaggagcagctcgccgccgagcaggcccgcctggccgggctgatccgcgacaagcgcttccgccagcattcgctggtcgcggtgttcgagggcaacgacgcggccggcaagggcggcgccatccgccgtgtcaccgacgcgctggacccgcgccagtaccatatcgtgccgatcgccgcgccgaccgaagaggagcgtgcgcagccctatctctggcgcttctggcggcacattccggcgcgtcgccagttcaccatcttcgaccgttcctggtacggccgcgtgctggtggaacgcatcgagggcttctgcgctccggccgactggctgcgcgcctatggcgagatcaacgacttcgaggagcagctcagcgagtacgggatcatcgtggtgaagttctggctggcgatcgacaagcagacccagatggagcgcttcaaggagcgcgagaaaaccccctacaagcgctacaagatcaccgaggaagactggcgcaaccgcgacaagtgggaccagtacgtggacgcggtgggcgacatggtcgaccgtaccagcaccgagatcgcgccctggaccctggtcgaagccaacgacaagcgcttcgcccgggtcaaggtgctgcgcaccatcaacgacgccatcgaggcggcgtacaagaaggacaagtgaggcctgccggaatgcggcgccgtcctctccaggggatggcgacgcatacgccggatgaatgatcggtgcctcgcgcgattgcctcgccttatcctcgctcgatccggccgctgccccggcggccgcccgacaataacagcgagggttcccccatgcgtgaagtggtgatcgtcgacagcgtccggaccggcctggccaagtccttccgcggcaagttcaacctgacccggccggacgacatggccgcccactgcgtcgacgcgctgctggcgcgcaacgacctcgacccgctgctggtggatgactgcatcgttggcgccggctccaacgaaggcgcccagggccacaacatcgggcgcaacgtggcggtgctctccggcctcggcatccaggtgccggggatgaccctcaaccgctactgttcctccggcctgcaggcgatcgccatcgccgccaaccagatcgcttccggttgcagcgaggtgatcgtcgccggcggcgtcgagtcgatcaccctgaccctgaagagcgtcaacaccgaccacctggtgaacccgctgctgcaaagggaggtgccgggcatctactaccccatggggcagaccgccgagatcgtcgcccgtcgctacggcatcacccgcgaggcccaggacgcctacgccctgcagagccagcagcggatggcgcgagcccaggcggacgggctgttcgccgacgagatcgtgccgatgaccacccgctacgcggtggaggacaaggccagcggcgagaagcaggtgctcgacggagtggtcgaccgcgacgactgcaaccgcccggacaccaccctcgaaggcctggcctcgctgaagccggcgttcgccgaggacggttcggtcaccgccggcaacgcctcgcaactctccgacggcgcctcgatgaccctgctgatgagcctggagaaagcgctggcgctgggcctggagccgaaggccttcttccgtggcttcaccgtggccggctgcgagccggacgaaatgggcatcggtccggtgttctcggtgccgaagctgctcaaggcgaaggggctgaagatcgccgacgtcgatctctgggaactcaacgaagccttcgcctcgcagtgcctttactgccgcgaccggctggagatcgacaacgagaagtacaacgtcaatggcggctccatcgccatcggccacccgttcggcatgaccggctcgcgccaggtcggtcatctggtccgcgaactgcgccggcgcaacctgcgctacggcgtggtgaccatgtgcgtcggcggcggcatgggcgccagcgggctgttcgaagccgtacgctgagcccgtgcgcgacggcgggccccgcaggtcggggctcgcctcatgggttttatttacatgacgctccgtgccatccccggcgactcgcgctaggctaggcgcctttttccttgcatagggatgtagcgatgtccaccgagcccaactcgccgttcgtcgacgacccgctgagcgccgtcgatgcacggattctcggcagcctcgtcgagaagcaggcgaccaccccggaaacctatccgctgaccctcaatgccctggtcctcgcctgcaaccagaagaccagccgcgatccggtgatgaacctcacgcccggccaggtcggccagagcctgcgccagctcgaggggcgcggcctggtcaggctggtgatgggcagccgcgccgaccgctgggagcacaccctgggcaagggcctggaattggtggcgccacaggtggcgctgctcggcctgctgttcctgcgtggtccgcagaccctcaacgaactgctcacccgcagcaaccgcctgcacgatttcgacgacgtcgagcagatccgccaccacctggaacgcctcgccggccgtggcctggccgtgcacctggagcgtcgcgccgggcagcgcgaggagcgctacatgcacctgctcggcagccaggccgacctcgaggccgccgtggaggcgatgggcagcgacccggaacgcgtcgcgccgaccgctctgtcggccgatgcggaagcgcggatcgccgagctggagacgcgcctggcggcgctggaggagcgcctggccaggctcgaaggaggggcgtgatatcgcgggagggcgcaatcggtgacatgcaggttccggcggataaccgcgagcggttgttcgccctacggcccacagtgactttgtgggcggcgctgcctgtcgggtagggcggataacgccagcggcgtt

(The sequence listing continues in the following parts.)
